United States Patent Application Publication US 2002/0132753 A1 - sequence listing, part 2

SEQ ID NO: 1674 - DNA, 6181 bp, Homo sapiens
tttggaggaggaggagccaagatggccgaataggaacagctccggtctacagctcccagcatgagtgacgcagaagacgggtgatttctgcatttccatctgaggtaccgggttcatctcactagggagtgccagacagtgggcgcaggacagtgggtgcagcgcaccatgcgccagatgaagcagggcgaggcattgcctcactcgggaagcgcaaggggtcagggagtcccctttcctggtcaaggaaaggggtgacaggcggcacctggaacatcgggccactcccacccgaatactgcgcttttccgacaggcttaggaaacggcgcaccaggagattatatcctgcacctggctcggagggtcctacgcccacggagtctccctgattgctagcacagcagtctgagatcaaactgcaaggcggcagcaaggctgcgggaggggtgcccgccattgcccaggctcgcttaggtaaacaaagcagccgggaagctcgaactgggtggagcccaccacagctcaaggaggcctgcctgcctctgtaggctccacctctgggggcagggcacagacaaacaaaaagacagcagtaacctctgcagacttaaatgtccctgtctgacagctttgaggagagcagtggttcccccagcacacagctggagatctgagaatgggcagactgcctcctcaagtgggtccctgacccctgacccctgagcagcctaacggggaggcatcccccagtaggggcagactgacacctcacacggccgggtactcctctgagacaaaacttccagaggaacgatcagacagcagcattcgcggttcacgaaaatccgctgttctgcagccactgctactgatacccaggcaaacggtctggagtggacctctagcaaactccaacagacctgcagctgagggtcctgtctgttagaaggaaaactaacaaacagaaaggacatccacaccaaaaacccatctgtacatcaccatcatcaaagaccaacaggagataaaaccacaaagatggggaaaaaacagagcagaaaaactggaaactctaaaaagcagagtgcctctcctcctccaaaggaacgcagttcctcaccagcaacggaacaaagctggacggagaatgactttgacaagttgagagaagaaggcttcagacgatcaaactactccgagctacaggatgaaattcaaaccacaggcaaagaagttaaaaactttgaaaaaaatttagacgaatgtataactagaataaccaatacagagaagtgcttaaaggagctgatggagctgaaagccaaggctcgagaactacgtgaagaatgcagaagcctcaggagccaatgtgatcagctggaagaaagggtatcagcgatggaagatgaaatgaatgaaatgaagcgagaagggaagtttagagaaaaaagaatagaaagaaatgaacaaagcctccaagaaatatgggactatgtgaaaagaccaaatctacgtctgattggtgtacctgaaagtgacggggagaatggaaccaagttggaaaacactctgcaggatattatccaggagaacttccccaatctagcaagggaggccaacagtcagattcaggaaatacagagaatgccacaaagatactcctcgagaagagcaactccaagacacataattgtcagatttaccaaagctgaaatgaaggaaaaaatgttaagggcagccagaaagaaaggtcgggttacccacaaagggaagcccatcagactaacagcggatctctcagcagaaactctacaagccagaagagagtgggggccaatattcaacattcttaaagaaaagaattttcaacccagaatttcatatccagccaaactaagcttcacaagtgaaggagaaataaaatactttacagacaagcaaatgctgagagattttgtcaccaccaggcctgccctaaaagagatcctgaaggaagcactaaacatggaaaggcacaaccggtaccagccactgcaaaatcatgccaaaatgtaaagaccatcgagactaggaagaaactgcatcaactaacaagcaaaataaccagctaacatcataatgacaggatcaaattcacacacaacaatattaactttaaatgtaaatggactaaatgctccaattaaaagacacagactggcaaattggataaagagtcaagacccatcagtgtgctgtattcaggaaacccatctcacgtgcagagacacacataggctcaaaataaaaggatggaggaagatctaccaagcaaatggaaaagaaaaaaaggcaggggttgcaatcctagtctctgataaaacagactttaaatcaacaaagatcaaaagagacaaaggaggccattacataatggtaaagggatcaattcaacaagaagagctaactatcctaaatatatatgcacccaatacaggagcacccagattcataaagcaagtcctgagtgacctacaaagagacttagactcccacacaataataatgggagactttaacaccccactgtcaacattagacagatcaacgagacaggaagttaacaagaatacccaggaattgaactaagctctgcaccaagcggacctaatagacatctacagaactctccaccccaaatcagcagaatatacttttttttcagcaccacaccacacctattccaaaattgaccacatacttggaagtaaagctctcctcagcaaatgtaaaagaacagaaattataacaaactgtctctcagaccacagtgcaagcaaactagaactcaggattaagaaactcactcaaaaccactcaactacatggaaactgaacaacctgctcctgaatgactactgggtacataacgaaatgaaggcagaaataaagatgctctttgaaaccaacgagaacaaagacacaacataacacaatctctgggacacattcaaagcagtgtgtagagggaaatttatagcactaaatgcccacaagagaaagcagaaaagatccaaaattgacaccctaacatcacaattaaaagaactagaaaagcaagagcaaacacattcaaaagctagcaggaggcaagaaataactaaaatcagagcagaactgaaggaaatagagacacaaaaaacccttcaaaaaattaatgaattcaggagccggttttttgaaaggatcaacaaaattgatagaccgctagcaagactaataaagaaaaaaagaagaatcaaacagacgcaataaaaaatgataaaggggatatcaccaccgatcccacagaaatacaaactaccatcagagaatactacaaacacctctacgcaaataaactagaaaatctagaagaaatggataaattcctcgaaacatacattctcccaagactaaatcaggaagaagttgaatctctgaatagaccaataacaggatctgaaattgtggcaataatcaatagcttaccaaccaaaaagagtccaggaccagatggattcacagccgaattctaccagaggtacaaggaggaactggtaacattccttctgaaactattccgatcaatagaaaaagagggaatcctccctaactcattttatgaggccagcatcatcctgataccaaagccttgcagagacacaaccaaaaaagagaattttagaccaatatccttgatgaacattgatgcaaaaatcctcaataaaatactggcaaactgaatccagcagcacatcaaaaaccttatccaccatgatcaagtgagcttcatccctgggatgcaaggctggttcaatatacgcaaatcaataaatgtaatccagaatataaacagaaccaaagacaaaaaccacatgattatctcaatagatgcagaaaaggcctttgccaaaattcaacaacacttcatgctaaaaactctcaataaattaggtattcatgggacgtatctcaaaataataagagctatctatgacaaacccacagccaatatcatactgaatgggcaaaaactggaagcattccctttgaaaactggcacaagacagggatgccctctctcaccactcctattcaacataatgttggaagttctggccagggcaattaggcaggagaaggaaataaagggtattcaattaggaaaagaggaagtcaaattgtccctgtttgcagatgacatgattgtacatctagaaaaccccactgtctcagcccaaaatctccttaagttgataagcaacttcagcaaagtctcaggatacaaaatcaacgtacaaaaatcacaagcattcttatacaccaataacagacaaacagagagccaaatcatgagtgaactcccattcacaattgcttcaaagagaataaaatacttaggaatccaacttacaagggacgtgaaggacctcttcaaggagaactacaaaccaccgctcaatgaaataaaagaggatacaaacaaatggaagaacattctatgctcatgggtaggaagaatcaatatcgtgaaaatggccatactgcccaaggtaatttatagattcaatgccatccccatcaagctaccaatgactttcttcacagaattggaaaaaactactttaaagttcatatggaaccaaaaaagagcccgcatcgccaagtcaatcctaagccaaaagaacaaatctggaggcatcacgctacctgacttcaaactatactacaaggttacagtaaccaaaacagcatggtactgataccaaaacagagatatagatcaatggaacagatcagagccctcagaaataatgccgcatatctacaactatctgatctttgacaaacctgagaaaaacaagcaatggggaaaggatttcctatttaataaatggtgctgggaaaactggctggccatatgtagaaagctgaaactcgatcccttccttacaccttatacaaaaattaattcatgatggattaaagacttacatgttagacataaaaccataaaaaccctagaagaaaacctaggcattaccattcagcacataggcatgggcaaggacttcatgtctaaaacaccaaaagcattggcaacaaaagccaaaattgacaaatgggatctaattaaactacagagcttctgcacagcaagagaaactaccatcagagtgaacaggcaacctacaaaataggagaaaattttcacaacctactcatctgacaaagggctaatatccagaatctacaatgaactcaaacaaatttacaagaaaaaaacaaacaaccccatgaaaaagtgggcaaacgatatgaacagacacttctcaaaagaagacatttatgcagccaaaagactcatgaaaaaatgctcatcatcactggccatcagagaaatgcaaatcaaaaccacaatgagataccatctcacaccagttagaatgtcaatcattaaaaagtcaggaaacaacaggtgctggagaggatgtggagaaataggaacacttttacactattggtgggactataaactagttcaaccattgtggaagtcagtgtggtgattcctcagggatctagaactagaaataccatttgacccagccatcctattactgggtatatacccaaaggactataaatcatgctgctataaagacacatgcacacgtatgtttattgctgcactattcacaatagcaaagacttggaaccaacccaaatgtccaacagtgatagactggattaagaaaatgtggcacatatataccatggaatactatgcagccataaaaaatgatgagttcatgtcctttgtagggacatggatgaaattggaaatcatcattctcagtaaactatcgcaagaacaaaacaccaaacaccgcatgttctcactcatagatgggaattgaacaatgagaacacatggacacaggaaggggaacatcacactctggggactgttgtggggtggggggagtggggagggatagcattaggaaatatacctaatgctaaatgacgatttaatgggtgtagcacaccatcatggcacatgtatacatatgtaactaacctgcacattgtgcacatgtaccctaaaacttaaagtatgataataataataataataaataataaaaaaagaa

SEQ ID NO: 1675 - DNA, 861 bp, Homo sapiens
gtagtcttttttttttttttttttttttgagacggagtctcgctctgctgcccaggctggagggcagtgcgcgatctcggctcactgcaagctccgcctcccgggttcacgccattctcctgcctcagcctcccgagtagctgggactacaggcgcccgccaccatgcctggctaattttttgtatttttagtagagacggggtttcaccgtgttagccaggatggtctcgatctcctgagagatgtagtcatttttgcattcctcccatttccgagtttttccttctcccatcgagtttcctgccactcaattgctaggagagaaaaccgggctctgaggtcattcatacttaatctgaatgagttcacagggcaggtcctggggcaaatagcagtctacactagggcctgctgagtagcactctattttagtatcaataaagggtttataatgctgctaggtatcaagctcccagctatgcaccgaaggtaaaggataccaggttctttcctcaaggttacaagataacaaatatcttggtttgtatgtatgtatgtatgtatatatatatattttttgagacggagtcttgctctgtcgcccaggctggagtgcagtggtgccatctctgctcactgcaagctccgcctcccgggttcacgccattctcctgcctcagcctcccaagtagctgggactacaggcgcccgccaccacgtctgactaattttttgtatttttagtagagatggggtttcaccgtgttatcccggatggtctcgatctcctgacctcgtgatccgcccccctcggcctcccaaagtgctgggattacaagcgtgagccaccgtgcccggcc

SEQ ID NO: 1676 - DNA, 4654 bp, Homo sapiens
cagaggggcagaatgaagtatttttcagaaacattccgcttttcatggtcgaaataattttatttatccagaatatacagtttaattcctctatctacacttatttacatggctaaaataacattgaaaaaagtcttttgaaaagttgaggtcatagatttcaaggcaccattgaaagtgtccacagttgcgcaaaaaaagtcctctgtaaaaaaagggggggtcttttgaaatgcaataacttacatgcaaaaaaaagctttacacatgaatctttttcagttttccgaacttccccatatgaattcctttctttatgattttctagaacagcaaaacacagtagtcccaaaaaagagagtaagagagagcagcccatctaatagagtgtcccggaggccagcgccagcgggtgctgtaaggagcccggcggcggcaggtgggaattgattgagctggctgcacttgtgtaccaggatgcagagttctccaggtagctggacgctggggactggttggaggtcggagggtgggcatgagggtggtggctgagcgagcgggacgagccctggggctcccacaccgctggagactgcggcgagttacacgccattgggtcgctggagctgggactgtgctccgggggcatctccccgtttttcatgatcttcttgatcttggatcttttgttctgaaaccagattttcacctgagttggggaacaaaggcacacgttaccgggacactcagaggtcgcccgcgccttccccggggcggcgactggaggcatcttcggacctctgggcggcccagccctgcctggcgtctccccgccgcttgcggcctaccgccaagaagctatgccttaggcaaaccatggagctctggccccagagggcgccctggccggctcggggcgccccggcccagcgaggccacgaccccaaggcttgtcttttgtttgggctgggggtgggggacgccagcgcggcgggtgtgcgcccgagtgtcctcggcggcggcgcgcctcgtgtaagcctgcgcaggacgcgcggaacgcggcgaaggtctccaaaacaatcgcgcgagcccggcggggaaggggcgtggggcgggctacgcgcgcctgtggtcagaaaaaggagcgagctcccaacctcccgtcctactcccttcactccctctgcagctcagagaggccagaatctgactgcagctcttggcggcgactcgaacattctttatgcttccgtaggccccagctgggttggaggagtaaaaggaatgggacaatccaggaagacttctcacgtacaatagcgccccccacctcgcgacccttcggtggccgtggcctgaagctcccgtaggctcagggcacgacccttcagtttctccgctccaggcgacgttctcagccttttcttagcctgagaccaccgcgagaacaccaggccttgctcacccccgaggaggctctacattgttaagaaaaccagatagctgctctgggctgcctaggccgccctagaaataaccctccgcttgctttcaacccgcgaaattggccccacagctccggaggcccgctacggggtgggggcggggggcgcggttagtgggaggtatctccagaccgctgatgaataccatccccaccgtctcaaggcctgactcaccgagttaaagcataggggctgatgtctttgggtctgttagtttctcacgggtactgtcaaaacagctccagtcccatcgagactgaaccgcgcgacccaaccagacgtgcagctcaggcaggtctagtgcatggcagcgccgtatttacctgtgtttgtgtcaatcccagcgaggcggccagctcggcgcgttccggcaaggcgaggtactgagtcttctgaaaccttctctgtaatgcggccagctgaaagctggaataaatagtcctgggtttacgaactttctttggtttgccattcaccattctcacctcgggctcggtcacttctttctctaaataatcaaaacagactcagttaaagcttgtcaccagacaatgccccttttgcggaagggcctcaaatagagtcctagagtttcttaccactcagtcttcattctttgcccatatcaccaccacctttgcttttcaggaccgcgataaatatgcacctaccccaaatatggaaaagcgggatagcctctgattaattcctactctgttcattcagatagtttgtgcaaagcgcttcctacaacactgctttctccttggcatctgggattcagctcttgcggtcgttgcttcttctcccggacttgtttttacgcccaccctgtgctcctccgcgtttccgcccctccccaggcttcaagaacaccagcccctccccaggcttcaaggaggtggccctgggccgtgaccctacttctgtcggcgtctgttcgggcgcccgcagaagccagactcttgggcagggaagacgctaaccgaggtctccaaagttcaaagacccacaagcaaactgctccttcacttcagcagcaagcggtcggggccgccgcagacagagggtcgattatgcaacccccataatctcgctgcagatctgcgagggcacagatgtgtctggtttcttttacaaatagacttaatatgttcttggcaaaaaaaaaaaaaaaaaaaagaaatcttccacttatgcacggaatacagagagagtgaaagaaacgtagacacctcaacccggggctctcttttaaagttcagcaagagtcacacactgagaaggaaccggtggtggggtgttttcgtaggaaaggggcggcaggtcaggatgagattctcactgtcatgagtatgggtttgggcgggagggggagggattgccaaacgcgtgttgtacaaacctgccctggggctacaactccccttcctcaaaactaccacccctctggaactgacggagaacctctccagggtgtgtgtgtgtgtgtgtgtgtgtgtgtgtgtgtgtgtcaagttccagggagaagtgtggaggatgagggctgtggtctcaattctgccagagtaggggatgctaatattagcaggattattaatgtgctggtgggaagagatcaaaccttaccaataaaacctctccgccgagcctcatgcctttctcttaccgcccaagctcactaaccctcttaaactctctaagtaagtttcaaagcggacgaaaaaggaggacggaaagacaaattgtgggcgcctatggagacagaaaaaaaaatctatcctacaacgtgacccctcagcaaccctcctccacctttaaatggctttttgtttttggaaatgcctggataaaccgcaaaactctcggcgcgctcttctctggctggctacaactccttaacccccccacccccacccagcgtgctcagggcacccgcaccgtgctagcttgtggcggctctcaaactaatcctgactgagtttttgaggcagccttctattcccactcgcaccaacccagcacgcttaccaaaattcccaagtaaccttctctttgttacgcaaacgccaggagctgcttgattctttcttctctccacccctatcccctttccagcctagccggcttcctggccgggcaagctgggaattcagcgactgaagggccttggaaggtgccggaggggagagacgctagttcgaacctccacagggctctcctactaaaaatccctaaaatgctggcccgagaaactctctttgttggagggtctgagtcctactcccttctgccgcgtgcgcccccactgccgtgaaccgctgtgacccccaatctaccaccccatctcgcgcccccagcgtcctagtcgccctgtatctgcccagccttccccctgtccatgtacctggctggttggtggcgcttgggacgcggttgtaggcgccgccgtactggtggtaggagctagcgtagctatagtcggcataagctttggctgggtagctcccggcggagccgttcacgccgtgatactgatactggtaggggttgagagctttgccataggaagccgaggtaggagagcagtagccgtgcggggctccccccgtagggctgtagtagtcagaatcggtagctgaagactcgggcaaagttggcgattcctgagacggatggtgcatagctgcggacgtctggaacggagcttggaagtcgccggatcggatgctggggacccttctgtcaaacactcctgtcatcgctcacgggcggcggcagcggctgtccttgctgttgtggcggcggcagctgccctagttggctgtggggctgctctggtctaagcagacatggctgtgggagcgagggaggaggaggaagaggaggaggagagaaggaggaggcggcggccgcggcgaggaggagactgggagtcgtgaagtctctgtctccggccggctgactgctggctgaggcgcagcacagccttggttaaatccttaattgcgcgcttacgcacagcggggtggatctggttctattggccagggcctcgggagcaacagtaacaccctaactcgtccaactagttttagcacaacaaagcattgcttaaaaagggggtggggggtactgagggggtgtgt

SEQ ID NO: 1677 - DNA, 239 bp, Homo sapiens
gggttattgagggatttctgttgccttctaactcacatacagggtgagagggatgtatttttatttcagcattactttctacctgaaacaattatgagatatggcagtactataaacatgccatatatattatatatatatatgcacacacacacacaaagtatagcattgaacatatatacatatacagtctgcatgcatagagccccgacttctgttttcttttttgccttgttgga

SEQ ID NO: 1678 - DNA, 32191 bp, Homo sapiens
cttgaagtttcagaaaatgatcagagctttgaagtgaccatgactgcaaccacagaagtagcagatgatgaggttactgaggggactgtgacacagatacaggtatagtaaatcttttaactggcctcaggaggatgatcctttacacattgcttagctaataaaatgatgagaaacctcagcctcccaagtagcgaggactactggcacatgccactgtgcccaggtttagcccttattatgaaacaaattacaaagtttttttgttttgattactgccaaagagttgagttataatttaatatttagcctcttggtttgttatcaccattttagtgaacaaaaaacttttcataataatttctagtatttgtttaataagattaactttagacacaaaatggacaagatgtgaactgaaagtcagcatagttaaaaaccccctcagaaatagtctgtttcttactgtgtctttgctgtgaaccaggtgcagctattttgacatagtttggtagttaatgtactgtgtctccttccagtgatgagactagcttgaaaaacaattagaaactattataagtccctatgtatatagtactttgtggttgcaagaggtcttcagtgggctgaatattttaatttctaagccttatatatacattataggcatgaaatcctgcaaccaactcataaaagcttcattttaaaagcaacagcatactaaataaagctgagtcaacttaatagatgcataaagtagtgaaaaatgggggtaaaatactctaagactgattaatatttatatgtcatacatagataggtacccttcaaggtacctgagtttcctgctgttgtactcactaaactcattttattgacagtgttgaatactactgctattgcttaagaattatttgctcatttgagggaaaatttgagccctaaggcattaaatgtttgcccccaaatagtggttaatcagcataacagacttattcctaaggttcatggaatgggctctgctatatagacatactttgggaaatggtgatttgattctcatatccaactgattaagagaagataatttaagagtattttctacattatagttcttaaaagtgagtattgtatgtatcaaggtcttttgatagctctctgttacactctttactgatgtataactctaggatcaaatcttataaaaattgtgatcttcagaatataagaagccttagacacatatagtctgtctcaattcttagctttatacaggtccctcttgatttaaaaaatcaaaaagtatgacatgtaaatagagggctataaaacttattcacacttgttccagtgatttccagctttttgcccatggattcaaaaacgctttcataaacacactatatgtattaccaccagatataaaagtaaagtaataggcaacaatagaaatgtggcttttctcctaattgtaccttggttgtccactgacagcttacctctttccaagagagatgaggacaacttatctctttccaagagagatgggtttcaatttctctttatattagaagttcagtttctgtttattcaagaagtagtagtccagtccttcttaggatttaccttcagccggtgacattgcttagtctttttttagcccagagactgaattgggttcagtggtcactaaatacgtgactcttcccttattctgcttacgataggctaatacctcatacggtagcactgttgccaggtcttcctcatttacattacggttctctttaggccagggtcaactctgccgaaggcagcttttttcccctacagggtttgttagattagatatgcttgtaactgaaaatacagctagtggtggttgcacagaagacttagctgcattaagaataagtagtaccatatagttctttgagagaaaggtgcattaataaggctctagaggttggctaaagcaaagttgtcagaaaacaataagcggacagtgattttgcaataatgacttatgattgtgcctgttaatattttaagttaagagatgacattattgatgatttaggcagcaagcttatctctgagggcattaacaaatcataacacccaaccctaggacttccattttcctatctagaacagataataactgtatattgtatattgagctcatttacatgtgtaaatatttaaatttccctgaatattctatgttgatttaaatacttaatggactcttggcccattttatataaaactgaagccaatagtacatttacttgcttaaatgaaggtcatattgtgttaatgcatataattttgttttcatactgccataataaaaacagcaagaaatatttttttgtaaattggatatatttttactatatctaaaacaagtgaattccatatgactatatttaagttttataatgcttagcattacaaagatgaatccggttgagcattaaatcaagctgccatttttttgttttgttttgttttgttttgttttacttttaccttttcaagattttgcagaatgagcaactagatgaaatatctcccttgggtaacgaggaagtttcagcagttagccaagcatggtttacaactaaagaagataaggattctctgactaataaaggtaagataacactgtgaattttagtgcctagtgaaaaaaaatggagatagaaagggcttatagtcatcaggattctgagttggaccttcatcactgggattgagcagttagagtaattgagcttttctaactgaattaaatttggccccaaatgactttgaattaaggttatgaaaccaccatttgtttttcagtaattaattatttctcccctgatttgaagtaaattttgtcttgttaatttttgaacaaatgcatagtggtggcatttaagacaatatagttattgcttatgagagtaggaagtcaagccttttcaagggtctactaactttggtctgataagcagcttagaggctcaaggtaacatagtgtttacagtgttggctatgctcaagcatagctggggaaggtgctacaaaaaagtgagggttgtgtctgtgccactctgaagtacagaaaggaagcagaaaaacgtaaataattttcaaccactgtatagtaaatactcattaagaatacattattcacttgatattcaatatttaccttgccctagagttttttgtatgtgttctttttgcccataaaattttcactggagaaatttttcaaaaagttttgagcatgtttggctttttttatttttataagtttctttttagctgttctatattgttgaaaggctaagagaggtaattttttttaaatcttttaattaccattgtctttttttagtagggtcaaataaatgtattctagcgtaaaaaccagaagttacaaaagcaagtttacctagagacctttcagatttcagaggaatgagaaatgaaattagctaaattttatccccaaatataatttaatcacaaaggaaatctttggtgttttatttctttcaaggagtaacattttttataacattacttgttttcttttaaaggacataaatggaagcaggggatgtggtccaaggaagaaattgatattttgatgaacaatattgaacgctatcttaaggtatcttatggcatatttttatgtttcaccaatttgtttattgccaattgcaaaaatatcaacacagaatgttgtgtgcacttattaggagctttttacttatttttgtaatggattttcataatggctaacatgtagctgaataattctaaaatacattattatagtacaataatattttgaattctcagtttaaaatagctttactgctttagttaccaccctaaagtttagataaaatcttagtagcctctcaacattttaaagccttatcttttcaagaagcctatagagtttaatttattttgtttaaagcttaaggtatgcatctttgttttgttttgttttgtttttgttttttttttttttgagacagtcttgctctgttgcccaggctggagtacagtggcacagtctcagctcactgcaacctccgtctcttgggctccagctatattctcctgcctcagcctcctgagtagctgggattacaggcatgcaccaccacgcccggctaatttttatatttttagtagagacggggtttcaccatgttggccaggctggccacaaactgctgacctcaggtgatccacccatctcggcctcccaaagtgttggtattacaggcatgagccaccgcacccggctaaggtatgcatctttgaatgaatttttgatgtcatagtagtccttaccttttaaaaaaaatcaaaaatttagtttattttcttattcaggtttatttcttattagcttagtactcttcattaaatgtcttttgaacacagtatttttaaggctttggattgtgttaaggcatggattgctttaacagtgtttgcttttgaagtcagtgatccatttgggcagactggaaacaggtgaagagtgttagaaagcctggtatcatgtgaatgatacatgtgaattctgtacaagattacagaaagaagagtttttagagcagttatggaaaattttggtagagaaaggatttgagctgtcttaaaggatagaacttgggctagagtagaacttgagggaactgcatgaatacatgccgaagcagcaagaaatcaaagatcaaaaccaacacacattaaattaacccctttaccttgaactaagataaatagcctctggaaaactgggctccgaagtccatgccaaagaatttgaactttatcctataagagatgagaagcattaaagggtttaagaaaagctagtagtttagttgagtaagaaattggtggggtaaatctgtattctcaaggaaatctttctagagacttgctggccatctctgtaatggagttagattcaaatagtgttatgtctaaaatgtagatcattagcatcatttggggaaggatggtgtacggtgtttaaccattctcctatcgtttggtatattgactgcttactcttttccactctacactaatgtagaaacgcagtgctgcctagaaggcccacatttttaagtttaattttaactgcaactttcccaacctaagctctttgaaatacagaattttaaaactctaattcttcactaataaatgagatccttccaccatgtttgttgttttaagagaaacagaaatacagtggccattgaaaatgaatccagaagtgtatttcagttgtcctctagtcacatatgctttagttaaacctggaaaatgctattagtttagataaagcagtaatcagtgctaaggaacactgaactttgagaattaagctggtttcttgtctaggggattgaagtagatgatctcaaggacccttccaagttagtgattaatgggcaggagtgtgagtaggatttgagaccttttagaggactgtttcagtagaccaactgattgtggcaaaggacttaaactacagtggtagaaatagaattggtagggaaagggcagataaccaagtatctgcaaggatgcctgaactgaatgttgggcaagaaggaaaaggagttagagcaacttaagagtttttattttaggtgattgggagaatgatgatcagattggcagaaataggaaatgtccaaaagattattttggaaaaagatgatttgttcaattttggtttttgaccatagcttttattatgtggtgctcttctaagacttctgtagagctagttttaaacttcagagaattcgaattaattgggtgtcatatgtttcatatttgggttaaaggataaatgcaagtaacgtctataagcaagaaaaagggcaaggagtgtggaggcaggagaatctttcatctcactctgtggtcatcctgcaacacagtgtgcttgcatgtagtagctcagtaaatatttaggtttaatcattggcaaaattggaattgcataagaaagaattttagaaaccattctaaaatttagaaattttttgctgtgaagtttcatacattcaaaagtgtataaaatgcatacactgtgatttcacctgtttttgaaatttatataaatagattcattctctggatattctgtaactcagtattattttaatatccttacccatttatttaggtgtatttcattgtgcaaatgtgcaagttacccatttcacagttaatggtcatttgggttctttttagttttttattattcatttgtaccaatctagtgggtgttaattatggttttaatttatttctctgataacattttgatatgcttattggctatttgtgtttcttctttgaaattcctgtttgtgtctttcaccagtttttctgtggagttaacttttgtttaacttagactttcttaatgtatgctgggtactaatggtttattggtcatttgtattacagataccttgtcccaatttagtggcctgtcttttcctcctctttaggtgtcatttgatgagaaaagatttttaactgcaatatcaaatgtatcaccttttttgtttgtttgttttgcatgcatgcatgcttgcttgtttaagaaatcattccccgcctcaagggcatgaagacattctcacattatcttgtaaaagttttataattctgcatttcattgctgtaggtgtgagatataatttcagttgtatctctttctgtgtagatgtctaattcctaatttacagtgtccattctgttctaaatcaagctgccacaaatttgtttctaggttttctaacttgtttttaggttctgtttgttgatacttgcaccagtacagcgctgtcttcagaaatcccaatatctgatggggcaagcctcttcataaatatcttggctgttcttggccctttgctcttttgttataaatttagaatcagcttacagagagtgaaacactcaaatggagtttttattggatagcattgaatttgtacatcaacttggggggaattaatatcttcacagtatgtcatcttcctgtttaagaacatggtataacttcatttagttagttcctcttcagtatcaagttttatattttcctccataaaggacattgataacttgcctaagttctgatgctcttaattttgacgctgtgtgggagctttttaaaatgttatgtaaactgtgtagaaacgcaaataactgcattttgattttgtatctagcaaccttgctaaaattagttcttttttaaagtaacatatttttttcatagatttttgggtttctacatatatatcgcaagtgattcatcttttctattctttataattttggtttttttaaaaatctgattatcagtgaatcctaatttgataagacatacgaatattgaattttatgaatgtttttcccacatctgttgagattttacatttttttccataaatttgctgatgtgattaattacattaataatttccctgaaattaacacaaacttgtattcctgggataaactcacttttctacgtggacatactaatgtttttatacattgctgggttcagtgtgctaaaatattattaggatagctatgttagtgaatgcgtttgacctgaaaattctgttctgaaactgtccttctctggtttcactattaaggttatgctagcctgataaaataagcaaagaaatgtacccacttttttttttttttaaacttttgatagtttaagaacaggattgtgtgtctatttggtaggatttacctataatgtcatctatgtcatgtgggcctagtgtttttattttgagaagattatttaataactgattcgattttcttgatggtctgtgcctatttgattttctgtctcttccagagtcagttttggtaagttgatgtttgatgtcttctaggaattgattcattttaccaacatttaaatttattaccataaaattgttcatttctgttaatggtctaatctctgcagcgtctctatttaggcctcatttttccatttctaatactgtttgtgtctttttttaaaattttggcagaactttaatcatttcaagttttattaatcttaatggatgttttcaaagaaccaatttctagattagtttatcctttctgtgctttgattctggattccattgattttgctcttgtgattttcttccttctgctttctttagatctatttttaactttttataattttaaaagagttgatggaaattcaatttattgaatttgatagtttattcttggaacatttaagtgtcacttttgtatctcttgcatcatcttaaaagtttatatttgatttattaatgaattagtgatatattatttttctaaatgccgttgatgacctttaacattaaaacaaattttaaaagcatagtatatccatatgcattttatcagaaatccctaaatcaaagaaatgtaacccatttaggcacgcggaataaaagatgctacagaaatcatctttgagatgtcaaaagacgaaagaaaagatttctacaggactatagcatggggtctgaaccggcctttgtttgcagtttatagaagagtgcttcgcatgtatgatgacagaaaccatgtgggaaagtatgagaacttgtaatgctgcatgttttcatgtaattaggggaaatatttgaggaactgtccatttttttaaacaatagaaatatggtcaaggtattaattgttgttaatatttttatcctccaggtccatgttgtgaatatggtgaaaccttattattaaagcctcttttagaaattaggatctaattcactttatataggttagatttaagacttggcttacttaatatgtcaaagtctgctttgtagtaaagtaacataaaaaatacagtaatgattaaagatttaagaagtgtgaaaataacttgaaatttattggtaacatttttcctatttatttttagaatatagcattcctaggtcagtggcctttttttaaatccagaatggaaaagaactacatttctgaaaacaatgtatggatttctgttttagatagcatttatgggaaggcatcattaagattcttcaaatgcaatgattatatactgttactgacatatttttaatttctctttggaaattttaggtggcagtagtatggcttattagatactgccgagctaatgttggagctctttctctagctcttcagcagcctgctaatgaaagtacatttgaaagctgaagaggattaaattatgtttttgtgacagtggaaaaagagaaaaaattttaaatggagcataaatgacttgttagcaattcataaactttccatgcattacaaatggttacaaagtgagcagcgtttcataattattaaatggacatttttaaaaagaacattacataggctgtattgagtacttgcctactgtaataaagagcaagagtatgtcagatgtccatacctgggtaaaggaaatgaagataatcttaatttgttcagtgctttgagggaattttctgtagattttctttttagctctagtttacaatgtcacccataagtttttttggagtagttatgatttgagagtgccaaaatctaagtttgaaataaaggaactgttagacagcataggagcaaatgtatgttttaaatgttgattctttttctagagaaaattatacaatccttacctttattataactaaaaaatatttactgtttaaaaaaaaataaaaatagaagcatttattttcaactttttttttttttttttttttgagacagagtctgtgttgcgcaggctggagtacagtggcatgatcttggctcactgcaacctctgcctcgtgagttcaagctattctcctgcctcagccactctagtagctgggattacaggcgcctgccaccagctaatttttctgtttttggtagagatggggttttgccatgttggccaggctggtctcgaactccttgcctcaagtgatccgcctgccttggcctcccaaagtgctgggattataggcgtgagccgcaccctgcctattctcaacttttattaatccactttaaaatgggttactttaaaagtattatatgctaagtgacttaacattcagctccctaaatgaaattctgatttttattgaggtttttagcattcattgttttaattgattttttaaaaatttctctgaatttctagatatacacctgaagaaattgagaagctcaaggagtaagttttaaagtttttttcattaattctaattttttatgtcttacgtccttaaaagttttactttgaaaatttcaagaggtttttggcagactggtataattgaattgtgctattaagcatgattggccttaaaaagatcacatcaaatccattacttgcacaaaataaccattctcataatgtataatctggtctcctgatgccattcaccagatgcttcctcagaccactaataggggttccagaaaagattaaggggccatttttggtagcctgaagactaaatttggggaatttatataccaggatgaaaaccagggttgtgctacatggcttggtttagaatggtgacttggcaaatgtttcagtgaatatctgggctgactcaaccttgcaaaggctattgaatctcaggaagtagaattttgctttattgagttagaccttaaagtatggtttaatgaattgtatggatcatgaaaaaatttgaaggtagattctgtttataatgataaagacctgtgaaactttagatgtctaaagaagagtttgttgggtatatgctcaaaagggaaagtctggggcttgcctgggagattgtgtcagtaacctgaggggaaattggtcttttttgaacacatatccaagttacttatttcttctctgacccaggaaaaaggcaattgctgcctgtttttttttcacccacagacaactgtggaccccaaaaaaaggccacactttcaaactttggctctcaaagtattgctgcccacaacttccaaaccagtcaaatgggaagaagaagaatgaagaataaatgatgaaattaaaagggagaaaacaattgaaccaaatgctgattggcagactcttgttttaggctccggataaagcatggcaatgactgggcaacaataggggcggcgctaggaagaagtgcatcttctgtcaaagatcggtgccgactgatgaaggatacttgcaacacaggtactgtgactactactggtagcgttttcttgtcaccacttaagcctcctgccccttaggatactgccttttctttgctcttggggagcgatttagatcattcaccttagttcagactttattttctagtcttccttttccttgagcttattagatatatcaaactaatcttttactttgtttttgtataaggtaacattgtcttcagggacacaacatcaccttagtgtcaagatgattcagatctaacatgtttcagttttgtaacaatttcaatacttccccagttgagaaagtattttgaagacatacatgcagcaagtaattttaatttaggcccatctaactgttgaatttacattagcaacagctaatcagtgagtgtttatgaaaaactttagtcacaggtaagtcccaaattaggaagaagctgtgttccaaagatttgtaaatattttgcttattttaaactcaaagtatatttttccatagaaaaaatttatgattggtgtttcagtcccctggcaagaccacaaatgcctcttaatgcatgcagatgtcctgatcatactgttaaacctaatctttgcgaccaacaacgtatttaggctctgctattaactgtcatttaacctttctgagcctcacttccttctgtaaagtaaagagattagagtaggtggtctcatagtgcccttttagccataatgttctctgaaggatccacaatccatgcccactgttgcaattaaaaaaaaaatttctgaagtttagctttagcttccagggcatatacattttgaccttaaccccctgctctaaaaatgaaatcagaattctttcctgcttaactactgcactatcactgttacctgcagggcagtgagaacataacttctaccaactttgtcattctgtgacatggccagcttaatgaaagaagcagggctgtaagctttagatttaggataggatctcagagtttcatgtaagatgctgtgagtacagaaccccttttggtaacaaaatttggaaggacacagtggcatttcctgattgccaacctgagggattgattgatctgcctgcttccttctcatgttgtgacatacagctgctgatgaggccatgccatgaaacagcacagtctcaaagtagtcccatcctttcacagcatgctagaataggagagtagaactttgtcttgaatccatccacagtattcataattgtgcttggcatataatgaaaattcaataaacatttgctagatgaatggaatcccaaagcaagcacagtctttttgaaattttctagaggttttcagctagtaataacaaaatggaaacagaggtaaagaagatgaaaaaaaatggcttttttccctttctgtttttctgctctagctccataagaaaaagacagagaggaacatttggggttatctattagtgggtttatgggttgagaaaacacaggaataaaagtaaatacttgtatcagactttactaatatttcatcacagtagcttggagttgggatagtgaggaaacaagatggtagaaacctagtttttactaaaataggttgagcccattggtgtaatttcccttgtccctcatcattcattcctataagtaatggcctcttgaacttacttttgcagagcagggaatcttaggtgacagtaagaaaaaaagcatgccatttcttgtctgtcagccattgacgaagctcttcccacttcactgtttataaaggacttagtgtaacttgagaatacattcttctttgtagttatgttttgggtggtttttcttttcataattggtcagtgctttccattaggattctttattttcttttctactgagacccttactgggctagtaaaatgaaactgtcttagtgggtatatatggttttccaccagagggtcattcagaaacaaactcttagtactattgcttacttcctatcagtccttgtaaatagagggctgaatcagatttgtaaaagaagttagcagtggtagtctggatgatttccttttttcagggaagtggacagaagaagaagaaaagagacttgcagaagtggttcatgagttgacaagcactgagccaggtgacatagtcacacagggtgtgtcttgggcagctgtggctgaacgagtcggtacccgctcagaaaagcaatgtcgttctaaatggctcaactacctgaattggaaacagagtgggggtactgaatggaccaaggaagatgaaatcaatctcatcctcaggtttgtgtcctgaatcttgtaatgacaaaagcaacttaatttctgtggatgtcttgatagactttcctcttttggttttcctggatgcctagtgtctgaaaagtatcctttccatagagcactactgtttaagatcttaagtatttcatattgagctctttttttgtgttgtgtttgttcctttttttttttagtgggtttagtgctcatgcaaagtaccagattgaaggcgtggagactgaagtcctctctatatccacagaacaggtatggcacaggcagcggcagtgtagcttttccactgtcccaccaatgtgcctcagtcctagcctagggggaacacgtttaggataagagggctgttcagtctccatgcccttcaatccttggctactgtgctaagattgccaagaagggggcccagtctgtagttacctccacacctccaaagtagaccaaatcaaacacatccatttcatacaaattcaaaaaagctttaagatatcataatcccagcttatttttttaagtagctggtttaaccattaagatttattaactaaaatgggcaaaaatactagcaagaaattatttaagaccctgaagtaatagagactgtcaccatggctactccctaccgaaaatcaaattgtcacaacaaagctagaaaacgaacagatttttttaaacctcaaattttgttgtactgttgtgttgttttttgattgcagctattgcttttgtgttattttgttttggatttttttttcaactagtcatctttataaatagctcatttctaaatatttttgcttaacaatggaaacgctcagatccaggaagtaaatgacttagtaaatgccacactatgaaacattgcatatatacaactaaatctgttcttattctaacctttagcatactccttttccttcacagtgcctcatctggctctaaccatttatagtttagcccattggttgtacctttaattaaaagtggttgctgttggtatttcttagctgttagctctgaaagcagatctgcactcctggaatcctttcccgtgtaacttaacaatagcatctcattggcataacctgccattccctttatttgccagtgcaattacctgtagtcagaggaggggttcttatagagaaattaatttaatgtctaacgatgcttattttgtaactgtaggatagcagaacttgatgtagctgatgaaaatgacattaactgggatctgttagctgagggatggagtagtgtccgttcaccacaatggctacgaagtaaatggtggaccatcaaaaggcaaattgcaaaccataaggatgtttcgttccctggtaatgtattacttactttttaagctcctccccttttcttaccatatttactccttaggagtgagaggttagaagttctttgccccagctagagatatcatagcagatttctacttacaccacttccctgtttctctcagtaattgtttccttccccagagaagagttaatactgtttgtaattcctaaagcccctaaaatgaaaatgtacacacttattcttgttcttctacgtaaactatcaggaggaaataaaatcatgccacataacgatttaatttttatgtttttagagacagggtctagcttggttgtccaggccgacatgcagtggtgtgatcatagctcactgtaaccttaaacctgtcggctcaagtgattctcccacctcagcctcctgaatagctcggactacaggcacacaccaccatgtccagctattttttttcgtagagatgaggtcttgccatgttacccaggttggtctccaactcctgggctcaagtgatcttcccagcttggcttcccaatgtgctgggattacctgcatgagccagcatagctggccactcataacctttcagtcaacaacagatgtcatacatagtattggtctcacaatattaaaatactgtatttttactttttttctatgtttagatacacaaatatttaccattgtgttacagttgcctacagtatttggtacagtaacatgctgtaagggtttgtagcctaggagcaatagactgtatagatcatctagcctacgtgtgtagtaggctgtaccatctaggtttgtgtaagtacactgtgatgatcccatgacagaatcacctaatggctcatttctcagaacatatccccatccttaagtgattgatgactatatttttattttgtacaaagatgtacttctgaaaacctaagtttaagtcaacttttgtgagttgtataatttcaaatatcttagctaggtgtgttagagaaattctgtgataattttgtagaacaaaggctctgtaattttctaattttattaattatataaatctagagatcttaagttgggtttgcttaaagtgaagcatactttttgttgcctgttttgcatttaggtattaaacttagttgtacagtctgtttaatttaggttactaaatttattccccttattatagcactcttaacttccattattccaaaggaaaatttaatgctgaggaactttgccttgatgaaaatgtggttttttaaaatacccaggtataggccaggtgtggtggcttatgcctataatcccagtactgtgggaggccaaggcaggaggatcacttgacgctaggagtttgagaccagcctgggcaacatagcaagaccccattactacagaaaaaataaaaaccaattagccaggcatggtgggcatgtgcttgtagtcccagctattggggagcaagagcctgaggcaggaggatggcttgagtccaggggttcgaggctgcagtgagctatgattatgccactccagcctgagcaacagagcaagaccttgtctaaaaataaaattaaattaaaaaatccagttagagaggataagcgtattttacgaatagagcaaagcaaagtctagaattggcttccctgcgcaagaataccatattactgtttggaaaagagaagttgctacctctagaccaacagtcaagggcccttcagccctggcggggaaaacatacactattcgtttaaaaaatgaaaataagctgtttagcattgccagtattcttcctaaataataatcctatcaagacaccctagaatagaaaatgtcctgtttccatgttctttgtaatgtctacctttttttaacactataaatcttagatggcaagaataacaatattaagaattaaaatttgttacgatgtttataaaaatctcaggatatgttgttttttaaaatatcttatttttataagctctcacatccagtatgcagttatttattccaaatactttccctccttacctccccccacctcccttgctgcttagatggtggtctgtcggagaatcaatgttctttttgtctacccatctcccttcagtcttaataaaaggtcttaaacagttacatgagaaccaaaaaaacaacccaacgcttttggagaataaatcaggatctggagttccaaacagtaataccaattccagtgtgcagcatgttcagataagagttgcccgcttggaagataatacagccatctcttctagccccatggcagcattgcagattccagtccagatcacccatgtttgtaagtgtttgatcttcaagattccttgctgtttgatctatatgatttggttaatggctctgatgtcttttggttttctagaatgttaatagaaatttacccaagtcggtgaactgaaggacatctaagatattttgtttagttcagttaatatttgcacacacaatgaatgtgtgacaggaaggatgtataagcagttgcccaaccattataaaccatttgaaaccatcttaatttctagattttgtaattaatgacttaatagaaattattaaaaatagaaattagaatgaatgatagaaaactacctaaaaagcagtcaatcaagcaaagaaatagaattcaccaactggtatgtcgtgtagtaatttcactagaagacatatcaattggggattgatttgaggtcgtttggtaaagaaatgagttttggcaaggttaagaatgattttcttcagggagtaaagggccagtttcctattgggaactgtgtttggacagttttatgcttaatgagattatgggaacccagccattgttagagtgagaacttttttcttctttaggtataagtcaaattgatctttatcccttcccgtcagtcttgaattatagtgacaaaaaaaggaatgaggatgaaattctcagaaccatattcttccttgtttttggtctacatatgctacctgcatttgaaaagataacccaagagtattccaatcactatgttagtctcaaccaggtgattattggcattttgagcgacaggtttttgcagactgtcctttacattgcaggatattcagtgtcctttgatcttgcccacagaatattagtagtacatgccagtcattatgagaaacagaaacaccctgcatgtttccaaatataccattatgattccctggttgagaatcgcagaaccacatattggtgtttaacaccatatatccatgtacattgactgtcagagttaccttagagacatttaaactaaccatacctcttattcttaaaatcctaatctgaatttggttatctttctaccagtgtaatcaacaatgaaggatttcttttcgtttttgttacagtctgaggattgcaaagcaactaaaattactagtccaagtaaatatgagagttgctattggttataaattgattgggcatgttagtttttcttggctattgagttgacagtacccattgggaagacaaacattttataaatgataccttaatattgatagcatcattttaaatagtatttagaattttctctcttacagcaagaaaaatgaatatagttaagtgttctacaatccacctattacctgtagcattctaactaaaatctcttttcgttttttaggttagggaacagggatcagcaaatttctttatgtaatgagccagatagtaaatattttaggctttgcaggccacataggtttctgagggatagtctttgtttagcttttaaacaaccctttgaaaatgtgaaaaccatattggccttaagctacatttgtccctgacagtagtttgctaaccttgatttagttttatctggaatcacttcaaattattatagctgtgatcttatggatccatcaaacagtaagatgaatattacaaatcaagtgcatttctattggtaagggcattagattccttttaaatagctgagaagtgttgtagtcagaatttaataaactataataaacattacacagtaaaagttccaaatcatatttcacataatttacctataggtatgactgcaagcgccaaaaaagatgacatttctagcatgttctatttaaccttgagcagacgttgataaagtctgatcctcagttgacacacatgtaaagacattatactgtctgatctttattcagtccccaaatgtggtcttcggaaataatgctctcttaacatttatttgtgtttacaagcacttttgatcctcacagctgtatgaggtaggcaggacaggtaaaaaaaaaaatacctgaacattagtttataaagtaagttatttacccaggttttatactgctaggaagtgattaaagcctagtatttttggactaccagtccagacatccatagtgcttacccatatatacaagaaaactagtttttaccaagttcctgtctttttgcaggttggtcttagtgtgttcctctttacttcctaccgttagaaacatttaatcatgtataccaagggttagcaaaccttttctataaaggaacagatatagtaaatattttaggctttatgggccttctggtgtctgtcacaggtactcaactctgttgtagtgctaaagtaaccacagaaaatatataaaccagtaggtgtggctgtgttccaataaactttatttacaaaaactggcaatgggctggatttgtgggccatagttagcccacccctgcactatatgtcatgcaagacaaattcattagattccttatctctcttaagaaatgtaaatgacttcaggtctccaggcaaattattcaatattaaattgcctttatgataattgagtacactagagaaacttaaattaacaaaacatttattgtaaattattcttaccacagcttaccttattcttaccacagcttcagcagactctcctgctaccgttgactcagaaacaataacactaaacagtggaacactacagacatttgagattcttcccgtgagtaacgcttcatatatattggccatttttatgcatgagaaagatcagttgctatcacttttgtgtttcatttgcttatgattcataaaagtctgaggccaaatgaatggtagactaaatcagacttctacttttataattttaatcagcttttctctcatctgtatataaaccaaaatgttatctatatgaaaatgacagtgctaatgagtatatacatactgtggatttgtactgagttataatttataaccaaaaagttcatattggttatttgagaaagtctgtggacaaactaatcatgagcaatttaacaacattcattcagtaaacactgtactagccactggggatacaaaatgtaacagtcccagtgctaagtggtttagctgctttggaaatgtgttgtagctcctgaagaggttaagcacagttaccaaaggatccacctaagagaaatgaaaatatctgtccaataaaaacttgtacatgaatgttcatggcattaaacaaccaaaatgtctagcaacagaaaaatggataaaatgtgctattgccatgcaaatattactcagcaatgaaatactgaaacatggtacaacattgatgaaccttgaaaaataggctaagtgaaagaaaccagacaacacaaaatatcacatagtactgggctcccatttatttgaaatgtccaaaataggcaaatttgtagacgaaaagtagatcagtggtttcctgcagctgaagtgtaggttgaaagtggagcatgactgaatgccctttctaaaacaagtaaacctataattcatatttccttaagaaaataaaaattttattaaatcaagatttaatttaccatgaagaacacagagttattattagtgcaagactttattcatcctctccccagccaaatcccaagaggatggccacctttggaactttttactggcagcttacttaacctaagtcagtctcctaatctagtggtctttgaaatggggatgtataagacaaccatttgacacaggtagaaaacttttacttttttaagcccattcccctggtaaacaatatatgtacacacctacatatttgaggtatgtgttcaggtttttacttatggggtcacaatatttaggctttcccttaatttattaacaggataataatagtactccagcttcaaaaaattgtgaaaattaaatgttaagtatattaaataaaacacatataatatatacatgtacatataaagtatttaaaataaagcctcacatttgtgattaatatatgctacctttaggaaaatgatttaacctttatggaaaggaaaagaaattgagtcctcacagagttccaggcactttcataatcatttctaatcccaaacactttccatgagaagtagttactgtctccactttagcaataaggaaacctatatttggggatttagtacccaggagagttgtttcagctaagtacacaagactgaaaaacaggctacatgattttaactcccagacctattttagagtgcaaatacttttttagaatattaagataaacctaaatcaaattttttatatagaagcttatggtcgtgaaaagtttattggtcaattttattatacttcctttaaaaattcaaaagaaaatgtgttatttaatagttaaccagctttttcagataaacatctttctccttcagcagaacattgctaattactatttctgtaccctgtccctttctataaaaaatttcccaaaattataccgtgaaaaagtgttcaagtaaacactgctgttgtgccttttttttttaaactgggggcctgccagtttttacgtgctacaaagaaagaaaaagaggggtgattgggtgttgtgggttactgcactggaaacagtggctcatacaactgtcttggtgccctgaaacaaatagctgagaccagaccatagaaatacacaggagcaaagagcagcctcttaaaccttcaggctaggtaatgacttgagacgattatgccctacattgtattacttgttcgcaccttcacaatgggtaagtacatttgtgtctagtaaactaaactcagtccgtttttgtatataaaagtagacttaatcattgttaaactatctttcctttttcctttagtctttccatctacagcccactggcactccaggcacctacctacttcaaacaagctcaagccaaggccttcccctaactctgactgctagtcccacagtaaccctgacagctgctgctcctgcttctcctgaacagattattgttcatgctttatccgtatgttacataaattacttgatttttgagtacctgttatagaccaggattagttgataaggaccaaaatagaaggtagttatctaaacagttcttcctactgctgctgttccaggcacagtgttatacaccatcactctgccttcactggagtgtatgtttcatcccttctctttatgtaagatggctatacattagaatagggacattagaagaacaaaggccctagcaagtaaaggacaagggttctagaaaaatagtgataaaagtatttacagtttgagaggtaagagatgtggggggagacagtgaggtacccccataaatgtcatttgatttacaactttaacaggttctttaatgttttatagccagaacatttgttgaacacaagtgataatgttacagtgcagtgtcacacaccaagagtcatcattcagactgttgccacagaggacatcacttcttccatatcccaagcagaactgacagtcgatagtgatattcagtcatctgattttcctgagcctccagacgccctagaagcagacactttcccagatgaaattcatcaccctaagatgactgtggagccatcatttaatgatgctcatgtatccaaattcagtgaccaaaatagcacagaactgatgaatagtgttatggtcagaacagaagaagaaatctctgacaccgaccttaaacaagaggaatcaccctctgatttagccagtgcttatgttactgaggtaagttgtactttaagaacaactgaatggattcttgccttgagcctcaaacctgcagtttgggaaacttttttctgaagactcatgaaattaagctcaaacccccaacctcacacctcacaaagtgttgtcactggcagaaatgggcaggcagtgatcctgtggcagtcaggaagaataagaaaaccatgttctatcttaccacagttcctcactaaaactttttcctctttacctacaatacattgagaaatgtttgttagaacccatagaagcattttcctgagtggttagtaatctttgtggttcagcctaggaacatcatcctacactgtaacagcattgtttcttctgttatattcagctgacctataactgacctagtccttatgagttccttttgttaaaagtatgttagattgtgaggtcatcttttgtccctgtgagaccttaactttttattttatattctgatttttaaatgggttatgtttaagtctaacctatacatacctatacatgggattttaaggaagactagtaagaatatgagtcaatattttttttttaatgttatttagggtttagagtctcccactatagaagaacaagttgatcaaacaattgatgatgaaacaatacttatcgttccttcaccacatggctttatccaggcatctgatgttatagatactgaatctgtcttgcctttgacaacactaacaggtactgtaatataatacttactatgtgcctgataaattttagatggaaaaaaacagacatttaattaacttgtttcagtctttcttgatccaataagctactagtcctgttgagttctacactgtggtagaataccttaaattcttgacatggattagagaataaatatatacatttaagactaacttgaaactcattacagatcccatactccaacatcatcaggaagaatcaaatatcattggatcatccttgggcagtcctgtttcagaagattcaaaggatgtcgaagatttggtaaactgtcattagaataattcttagaaataggcagttcaagcaaagaaggcacactgttaattacaacctcttcaaagaaataggagcaacccccaagaggcttaatttaccaatttaaatagccacagtccttaagccacacacattgttgctgctatgactttttacctcctttaaacacatcatctgaggttgagttttatgacagtatgtagttgagtggaggctgggagttttaagcataaatccctgtttagtgttacatgggaataaggaatttcattcacttcagccactaagaaaagtttagaatcacgaaagcttaactgctgtggtttaaagtacagtttctctaaagatcagacatggcactgtctcctctcaagcctggttgtagttcagatgagtcttttcaacatggtcttcaacatggtctagagcttaccagtgatcttctgatcttcaagaagactaagtttgagacttgaccagcatacaagtatagagacctaggaggtggtcttgtggtggtacatttggttaacccattgctggcagtgggagctgatttaggcagggtaaacaggaaagcattaaaagttaaaattcactacaggttttttgttacttttaaagggaatatggataagcatagtaacaaaacccaccagaatctaagcagttttcaccccctcagaaaccactgtcattagtttacaaagttagcactttgaagtaaaactaaatgaggaaggaagtaatgttacctatccttgataccatgaccatttattagatgttttgctatataaattaccgagagaatagtttgtcatccacttagtgtgttagctggtggggtacaatataacctctcatctcaggctattttaaaaaaacaatatttgcttctataacaaaaggaaacaaatctaagaatcattcctgtactacagaagggttaaggcaaaggtagccttttgggctttttaatgaatatgacccctatagaaaagtcaagaaaaaaaaacccttgtataaattattttatttattattgtaattagatcttcacaaagttgtcttttcactgtgttttgtcaacgtgaaattaaattgtagttataagcaaaagttggttgcctagggaacaattgtatattcagtttaacagaaataaaagaatatttgtcttaagatgcaagatttgtttttacatagccttttgccatacaattataaaaatttcatttcaaaagtgaaatttttttgtgctgttttagctttaagggttggaatgtttaggtgcaacatcagctccttaaagaaaaagcaaagtgatctaggatatgtctcccttgcaagagggaattaacatttacaattaacatgaaaatcatgtatcagacttctgcaggagattcttcagcataccttatccaaaaattactcactgtcctaatgtatcattttgaagagtcctggtaagtacttctccttggcagcctcaccttcccacatcatggaagtacaggtttgcacatatacacaacatgatgatagaaaatatgatatagtaaattagctttctaaatttcggttctaagtctccttgtcgataccagtagatctaaaagaagaattaaagtttataaattaaaatttgaaatataacattttctctaccaatttcaaatttcattagtatttgtttattcccctaaatgagacagacattctccatattctgaggtctctacattcctgagatcagtacagccagaatttaattcttactctgagtttccacatccaagatcatacttattcctactttctcagtttactttcctctatattcacacctgtatactccaccagtcatctggcaagctatccaagaacatatacctgggcatactacttaacaggaaaggaagacaacatttagactcatgattcatacagttggttcagaccgtaaaatagggcttccataatatatttggattaaactagttcattgtctgttagtcactttaggcttcaagctaggggaacaggaaagctcccaaagtgggatgggctagttcttcttcgggtcatgggagtatatagcaggatcagtgaatgagaacacttggaggtgtctcctggtttaattaattttaactcagataagcaaattactattgttttttcttttgattctgcctctaaaggaacatgaaacaatgtagccaactaatgaatgaacactgaggagccaccaccatctttgtttcttcaccataaaagaaacatttgcagtaaatcaaacatttttacaacaactgcagctttagatttcccaggaggttttggtgttaatacctccattttgggaaacaaacatgtagattaaactaattttgtaataattagaattaaatccagagtgctctatctcttcccttagcagtaactggcatttcccaaagactgttggcccttacgtagtccttgagtgaagatgaattaagtaaattaaaatctttggccacctacgtctttccactaattttttttttttttttttttttttttttaagctatcaagggagtggaatttctctttggggttacaactttgggatttaggagaaaaggagaagactcagattttattgagaattctaacatacttttagggggaggatgaggatataattaagagatacccttttgtatagacccaaggctgaaaatttttgtcctgtgcattgcaacttaaaccctcaagaacactgtttaaattctcaacagtacttacaagtatgcaggcagtaatactactcaaagagatgcagacagcaaagaatatattcaacggttttggaggtagttgagggaaaacaaaagcacttatcagcgttacctgtatgaagagaaattatgtaaggccttaacagtaattccaagacttggtaattaccaactggagtctaggcaacagtactacaaaatgcttcatgttataaaattacatctgccaccaagtttgctttctagaatgttaatacagtaattataaatatgttcgagttattttagtacttcttttctaaactttcccttacttatgaaaggagagaaaacatcagtaatactagctgatgccaaaataacttcattaactaaacctcactcccaggattaatgattctgctggtaaaagttctagccattttgttattttaaatatttctagcaaaatgaatataatcaaagctggttttgctataacattatgaaacacactgaaagacttctaatgttgtatagttctgtttctaacagatgcagcattatatgcaatcttttcattaagaagccatggaaaaaaattctcttaaatttaatgtgccagaaaaatgtcaaactatggaaaatacagcttttaaaaattttattgtaatagctcccagatgtatactgtatacaggatgtatacagtacaactactatacactgtgaccaaatcttttaaaacttgaccaaagggtaatggatatgttcttcaggaacaaaatagaaatggggaattatggtagatgacagaaggaagtggctactagccactgacatttttacaaatttactaggcaaaacatggtaaactcaattatcttaaaacgaagttgtctgacttgtaccatttcacatattcaacctgggggtggggcagaattaaattagctactccaattagcaactgcaattttgtggtaataaaattaaaagcacttatttagctttttttggaaagttaaccataattgataaagttttcaaaactggctaagagcctgggtgaggcacaaaatgaggatacttactagaatcaataaggatgttaagctgccaacaactaaattgatgattcgatcctgaaagagaaaagaatttttaagccatatgacttggatccatgttaccttcagtatagtacaatgcaaggcatttggatggtttactataaagaaacccaagatccagtcctctgagctttacacataaaactaccagacaaagcaaagtgtactgaaccataagagtggaaaatgtactttgggaaaatggccaactggggaaggtttcttgaagggacagaacatttatactagagtcttgattgggtagtatcaaatgggtaagggaggcttacaaataatgcatgtgctgctgaggatagcataagccaaaggagaaggacaggcactgcaggaatggccaggccagagcattggttaaaggtatcaggaaccggactagatgtagagtaccatgatgtgtctggaactatatttgtaatacagcttaggtatccttgtctagtctaaaaatagatgctactgttaaaagggatgggtcctagagtgccaaggcttggcacttgcaatcttaagagaccatccagtccagtagtttttccaagttatttaatagtgaagggctttagtatataaacaaaatattggttgaatgaagaacctacctactgagctttcttgtcattcccatcccaccccaaccaacaaagaatgtttgaaaaactgatccaatcctaattttacaggttaaactaaatttaggcccagtgtggttaaattattttctaagagtcataacaagttagaagcaattttgaaaccagagattcctaaatccaggtcactggttagaagtagtttcaggtactactaaaaaggtaaagtatgatagtgacatgcagtcttatttctgagaagtcaaagctgagtctttaacgaatcagtcgtcttaaatgttgttttgataatggtctgagcagagaatggcaggatatggaacatgccgccaataaacaaaacctcagagatgggaaggacacaggaacaatcacagagcagcaaccgaattctcatttccaagtagtcgccttttaaggataagaacccacagaagttaagagtcaggcaaaattgggagggaaagagtaagaaagccaagtattggatgtgtgtgatctaaccaaggacaaatcacaactctccagaccaaggccactgcaactgaaaggttacagaacaaaagatactggactccagccacaccctaactccagaggactcagaagagatcttaccacgacctcagctagagaagcctacacagcacacaggagcctgaacttaggaccactttgttaggaaagggacccagggacaagtcaccactcactttaacttcttcccacatgggacaacataaaatgtgtagagagacaaaatccatgggagccccactatttttgagaagcaagaatatctgctgctctctgagcgccagggatttccaaaatgaagcactgcatacctcataacagctcccaccaatagaagtcaagccaatatatcactaattgccaaatgacacacagcaagttgcctaccaggatcaaagtaggagaaaaataatggtaaaaggatattaactatgccaagcacattcaccaatcctctctttaaaaattctaggatgaaatggtaatatgactgtttcacaggtagcaaaacaggctcagggaaactgagaactttcccaagatctcaataccattaagtgataaagacaagattcagtgccaggcctcctttccctatttatgcttctcacccaaagaacaacctagagtgctagtgctggtctagacaaagatgtcaagtggcagatgacacctcaaaaagcctattagcaaagtactacactgtgcttacctttcaagaatgatttcctcatgggtgactttgttccacatttttggatttctccatataactgattttaatcatcctgatgaaaatatatctaaactttaatgaatactttcctgcctaccttttagatagtcactgaacagaattccaacagattttcatgaatatcagttattgttataatgtagtggtcccctctgggattcccaagatgggatgaactatttcggacatggcagaagtgtttctcagaatattttctttctccaagccaaggccttctatcaaccatgaattcaggtatgcagagttaacttcagaagccctcctacttctaatgctctctgttttaaacttgctactcaaagtgtagtctatgaaccagcacatcggcctcacctgagagaactgcaagaaatgcagaatcttaggcctcactgagaccaactgaatcagaatctgcgttttaacaggatctggtaatttatgtgcacatttaaaatggagaggctgtgctctaaagtttagtctaaaataagccatttttaaatattaagttcaaatcacagggtacagctccttccctgggcctagagattatttttcagggttttagcagctcttctagctcccaatctccaaagaggataatagagaataattaaatagctagttaattaacacttcaaaggacagtttggggaataatatgctccaaattggagctagagtacatggagaaaagtgagtaatacatttaaactttgctgtttatggagtaaattgaaactcattatttctacttctacagctagtctctattaactcaattatttctcacagaaactagctctgtctcctccccagttttattttcactctagttctacctaccataacttgtctctcctaccagaattttaaaccttgtactgtggcttattttcactccacaaggaagcttgacaggacaaaggatggcaattagcctggatccttgcctgctgagaggacaggatacagatttaggatttccttcccagagacaaaatattctgcaacaggtttagagatagtctgaattcatatatacatgaacataaagacagacgttgtgtgcatacatacatgtatatatatagttgagatttcacctatatcatcttgtaagtcatatatttatgcatttaaacattatctactataattcagatgcaaatacaaaagtgaataaaaacatctctaccttccagaagtttacactatccagagttcaggagggcactaagaagacagaaagtgagctatcttggacagtcaaggagagactaccagagaagtcaaaaccctgaggaagactagcagatgaaaaggaaaggaaagatggttcatgaaaggaattccacaaagacccatgggagaacaaaagcattgctgttacaaaaaatcaatgggacaaatggagattgttgaccaagtttcatgagagctgagaggaaaagagctggaatgcaatgcacagtgaagagcctgggcctgacggattcatgtctttgtcttcctttagaatgaggaaggagaaaaagatggagatatatgcaactggtttgtatctggaatggtggaaagcaagtaaggagtgttatctctatttaccaatgggtaactaggttccagaagactgacttgccaaaggtcacacggctaggtaatggcaaaaaatctcctatccaatgctgttcacaaaagacaagtgtaatgaacagttcaaaaggtctaacagtcctaaaactaataaatacagaccttaacacggtctagaaaccaaggttctcatctcattctgccactagctagcttcgtaacctcaaaaggattccttaacccatttgactctatcaaatgagaagactgggctaaatgatacctggtccctttcagttcttacactttatggttctgaatcaccagactgcacttgggccagagaaggactaatcccctagtgattaaaagccagagaacccctatacttgcctggtcagtcattagccagcatctgctagagaaactaaaactcaaatgatcaggtggtaacaatggccctgggaggaaactggcaataacatcccaaataaccaaaagctagctctgccctcagctcctcagctccctggaaatatcctggttctaaacagtttggaatgcttacaagcgacattgtattcagccttccatttccatggcaatgt

SEQ ID NO: 1679 - DNA, 215 bp, Homo sapiens
cttctttgtctacaaatcatagtggctctgccatccaaaatacattcacaatttgaactaccagccactctcacttgccttcaccctagtccaagccactgacctatcttttttgcatttgcccttcagactgtttttcttatagcagccagagtgagcctcttaaaataaaagattatattattccactattcaaaatcttccagtcgtttccc

SEQ ID NO: 1680 - DNA, 10563 bp, Homo sapiens
cggcccaggcccgagcccctcatcatccccaccaaggcgggcactttcatcgcccctcccgtctactccaacatcaccccataccagagccacctgcgctctcccgtgcgcctagctgaccacccctctgagcggagctttgagctacctccctacacgccgccccccatcctcagccctgtgcgggaaggctctggcctctacttcaatgccatcatatcaaccagcaccatccctgcccctcctcccatcacgcctaagagtgcccatcgcacgctgctccggactagtgagtgacctccctccgcgaccctggcaggagcggggctggggcactgggcagggaggcatctcagcctgtggggctgctggggattgggctggaacactctgggagaaggagctctgctctgtcttctctgagattgagaaggaggttgtcctggttcaacaaggaggggtggggggcccgcccagctgcttggattcaaatctcaattctaccatttactattacatccacttttgcaagtcacttcaactccctgggcctcagttttttcagtattaagatggggatattagtattacttggttgatgatgaaactgccaatattcaactatttttggattcacaaatagtagtttcctttggttcaacctaatagccacttcctaggctcaggtgcattagcacacataaagctggaacatcatgcccaggccatcctgtttgctcatagtcctttgtggcagatctagtctctggggctctcgaacagtctttttggccaaaagcagacattctggaaatattgggctggcttggggtgatgtactgctgaaaaatgttgcccactccataaagagatccatttcctctgcaaaatgggataatccaatcccttagggtggtagagaggattaagtggaagtagctagcttatagatgcctttggccaattaacctttgactgtgacctcacccatggtgtagctctctggtgccccctggtgtctgtggatgcaaaatgtttgccctaggctggccagccttctgtactgcttcctggggaggcttctccctggctaggctgtgtaggaagaggaagtcattgtagagatcagactggcagccagcgagaggtcagtctgtccacgagtatctaccgaacactcgggcgtaaggccttgtactgggtcctgtgagggctccaagaatgtacaggacaccatggtctgttctatagagaatgcaaggtcattagggagttgacatgaaagccttggagttgaaaaaacagaggttcccggtagtgtgggatctgcagccagtgagcaaagccccagcagctagcctgggatggtgaggactgtattcaagaggggtggggccagagctgagccgcagcgatggaggagggcggggggcagggaggacacaccaggcggaggaaatgactggtgcaaaggcctgtagatgggaccgtgcagggagagtgaggggttgggaggtaagcagtcagctaggatgcaggtccaggcacatgggtggtgggaggtacaaatggaagcggaaccgccttgaaccctgaggggagggttgcaggttttatctcacattgcaggagggagtcagtaaagagcaaagatttttttttttttttttttttaagcaaaggagtgttttgatcatgtggggccttaagaagaccaacttgggcctgggcacggtgactcacacctgtaattccagctacttgggaggctgagggaggagaattgcttgaacttggaggttcaactccttgagccgagatcgcaccactgcactccagcctgggcggagacagagtgagactttgtctcaaaaagcaacaacaacaacaacaaaaacaaaaaaaaaactagcttgggagaaactgaggcagaaaatccaaagaggaagtgagacgataactataaaacagcgatccccttcaccacctccctagtgtgctcaaagtttcagtctctttactagaaaaccacagctttatgttggagttagtgttggagcttctgggggcaaggatatggctttggtagtagaagcagtaataataatctttatcgagtgccaggctctgtgcattattttatccagttctcacattaaccgtaggagacaggtagtgatagccccttttggtgagtgtgaaaactgaggcacccaaatatttagtgaagggcctgcgttttcgtaggtgacaggctgcagagccaggactcaggtgcctgtgttccctgcgtgagctctgtgtgtcaccactgtgactcttgcacatacagggcagccactaggattgggggtgctttgctgaaaggggggtgctatttatcaacctgctctttgtcccatagacagtgctgaagtaaccccgcctgtcctctctgtgatgggggaggccaccccagtgagcatcgagccgtaagtgcagccctgcccctggccgaggggtgtgggtggccacactggtgcagtgtgtgcaggtgggccctgggagcaacaggagggttccgtggggcctgcagagggctgagagggcctccttgagcttctgtatgtggccctgggctttgctgtccccgccctgcctctgtgtggaagttgcagggaagggcaaggaccggctcagcttgaacttatctctaggagagttgaaaggggggtccagaggctctttcccatctgtaaacctgcagctgcttctcccctctccagcctctggaccttgcctttctggtggtgccaggtcaggctgtcctcccaagcccctagaagccagactccctacacctagctgaggccttgctctgccggctccccctcatcttcttcccaccctgagggatcatcaagttctccgtccccgcaaggtgaggcctcacttcctgcccttttcactcctctagacggatcaacgtgggctcccggttccaggcagaaatccccttgatgagggaccgtgccctggcagctgcagatccccacaaggctgacttggtgtggcagccatgggaggacctagagagcagccgggagaagcagaggcaaggtgaggaggggcctgggggcagcaagtgagggcaggcacatgggtgggccaggcctcaccctgcccagccccgccctgaacgtggtttcctcccctccctcctcatgctcctgtggatccagtggaagacctgctgacagccgcctgctccagcattttccctggtgctggcaccaaccaggagctggccctgcactgtctgcacgaatccagaggagacatcctggtgagaaggcaaccccagcagagggagggcccctcagtgggggctggcttggatccatgtctgctgctcaggacctatggctgctggcatgcacatttgaggccagtaggagggtctgactaaggaaggggctgtaggggcttgacccaagggagccctagtttcagaccccgggttttgctgtgcagtgtcctcctgtccattcccatccctgattctgggtcagtggactcagactggatggttgctgagagccttctccagcagtgctgcctcccttggggccatggactctcttaagaggacctgaggtctgttttctgggcagccccaccccctgtgatctcaccaccccagtggaccccttatctctcagcagttaagggggcaagagtaagtgtccaccctactcgggattttatcagggcctagaatgctccgtccaccaccgacacccctgtcagtgccctgacccttccctcacttcccctccaggaaacgctgaataagctgctgctgaagaagcccctgcggccccacaaccatccgctggcaacttatcactacacaggtgggcctggctgcggtgggcatggtgcctggagcctcaagaggtctccagcatccatggggccctgctcagtgctgagtcacagccctgggtgggggcgggaggaggagggtagataagccaagagtcagagtgagggaactgccaccaaagctggggtagctctccaggggtttcctgtgccctggaggggaggggagaagggagtgggcaggtgggagaccatccaggcaaaaaagcccaggccacaaggacaggaacccatggagagccatccagattggcatcaggtacctggaacttagccccaggagtgcatgtcctgttctggtcactttaagaaggacatggaccgagtcacataatcctaacagccaatgttttccatgcatgttagtgctacatttcatctgcaccaggcagagcaccaagggtttcacatgcattatcttatttaatcctcaccacagctggtgagctaggtgatattagtttccatttcacaagcaagggagcgaggctgtgaggcacatggaagtgggacgaggagccggctctgatgcctgcagaaaccatgggcggatggcctcacacttttttgcttgtcaaaattgccctgcagtggccagggccctgcccacctcactccctggctgcctctttgccccataggctctgaccagtggaagatggccgagaggaagctgttcaacaaaggcattgccatctacaagaaggatttcttcctggtgcagaagctggtgagctgggctctgtttcagggcaaatgagggccaggagctgcctgtgtgactttggggctccctctgccagtgaccaatccctcttaaaaagcagtcaggtcaatgctactgagtagcctcagagagaatttcctaaacaatacaagaaagagaaagataggtctcttttcccttttggttctaagcatcctttcctcacttcagggtagggtggccaagctctggggtctcaatccagaaggaggcctaagtgggcatcagacttaaaataggcaggaggaagatgcggaggagggtggcaagtagaggtgagccattccccagaggaagatgcagggggagggcaccctggggtgaaggccactgagagccagcaagtgcctgcggagctgacctgggggcctctgcccacttcctttgacccagagttgccttccagtaactcagctgttcaagcccacattccctagatttatcttgtcctctctccatattcttctggaaaagcagatgctttgctaatccaaggaattgcatctttccagccctgtctcacaaaatctgggctgtggggagagagaattgtgtggactgccaagggaaaagagtttttaaaaagagcatgccctttcctcttgggattgtagattgtattgggaacagccctggggactagacaaagtgctgatgatgaattcccctacaagggccctgttgtgaggagtcctttgctgtgttttagtaacacgctattccctgattgggcaatactgacgggaagtacacgcccgtgaaattcacggaggcgcccctaatgcctaatgaaatgagcagacctttagtcagtcaaacaaagggtcagagagaattgacagtaaatgtgtaaatggcctaattaatacatgtgtgacttggccatttctgtgagatgaaacatgtctgtttcctcctcagacacaaagggcccacactgacccctggcctctctggacaggagctcccagcccagcggtggctgagcaatgtgcgagcctgtgtggtggtgtcagaggaaacagcctctgggtgtgggaaagttgcccaaaaactaaacccagtggccaaatagatttatgcaatgggagagctagaatttcagagcttgagaggcaggtccctggagatcatctagtcttacttaaccccatttgctatttacacatgaaaaaactgaaattagaaaagtgagtgacttgcctaagctcgaatagctgtgtggtagcagagtcaggaggaagacttaggcctttcgcttcctcctcaggttttccagggctttcttgtgagtttcccttgagttcctcccccgacaggggacactgtgacatttctgtatgctcacttctcagccactgctccctggagagaaatgaaattgtttgcctggattaatgaaaagcgtctgtgttgccaggtcagggctggctttggatgtagatggtgcccagaccttttccctcaacttttcagtttgaaaaatttcaaacttagaggaaaatggaaagaacagtagaatgaacacccatccaccccggacttagatttagcaatcgttaacattggctatatttgctttctctttctctatgtctaaacatagacacacacatatacagctctctcttgttctctgattcagctaatcattaaaagtaagttacagtcatcctgtcacatgactaaaacctttcagcacgtatctcctaaaaaccaagatattctacaaaaccacagtaccattagcacgcccacgaaatttaacctgataaaataattcaggccaggcgaggtagctcacgcctgtgattccagcactttgggaggcagaggcagacggatcactcctgaggccaggagtttgagaccaggctggccaacatggcaaaaccccatgtctactaaaaatatttaaaaaaaactagctggttgtggtggcacacacctgtaatcccagctactcaggaagctgaggcacgagaattatttgaacctgggaggcggaggttgcagtgagccaaaatcgcgtcactgcactccagcctgagtgacagagcgagactctgtctccaaaaaaaagaaaaaaaaatacagtaatgccctctgatatgcaatccatattgccatctcccgagtggttccgacattgtcctttatagctttttttatttatttacttattttaaatagtgctgaagcattgattaattgatcagtggtttgttgcagagcaggcattggaaaaatgcttgtattgcctgggttggctgggtttcattttggcttgaagttaagggaaagatgcagggacgagaaaggctggattctccacaggcagatgagccaaaccagagggttctgacctcagttttgacttcaaaccagatccagaccaagaccgtggcccagtgcgtggagttctactacacctacaagaagcaggtgaaaatcggccgcaatgggactctaacctttggggatgtggatacgagcgatgagaagtcggcccaggaagaggttgaagtggatattaaggtgactccttttccaacctcagctgcatagagcctgggctgggtctgggaccaggcctgagctgggagcccgagcccgagctctccaggagcctgcagagggcaggttgaggaagacagtgtccctgacagccgcaaggagccctggaccgctgggttctcctctctatactgctggtgtcatagtaataatacattgtgttgatacacagggtaattttcccacaagattcacaccagcatcatcttcctatctccgcttagcagacctctaacactgtttctcaaacctcagtcattcttgtatcacctttttgatttctgccatatctgcatcctaccatgtgtcgccattagaatttttgtcatattcatatactacttgtgccattacttaatattttcctttaagtcaactcattttttactcagaagggaagttttatatcacagtgataaatagaaaaccaaggttgtgtgctataaatagaaggtactggtaaaaatatatgtgaaaaccagtattactgaattctagctagatgctgtgttacctgccaaggctgagactgagggctgaccttgctttgttaaagagattatcaagtctagagaagtataaaagacacattagcagcaaccagagactgagtccttggcataatcaggattgaaagagaattaaaagggaaggttacttaatcctatgtccatgtatccacctagcatcatttttgggattgcaaatccacgcttggtgacatgctacggtaagacagggagtggtttgctgcccattttgcaggcaggaaggtagtagagctacagaaagcattacaaagatagtttggaattggaactcaaggcttctgcctggctcaccacatcattgccgaggatgcctcctggtcatctgtccaggaggatgggtggcaatggggagtgactggtatgtaccctccttgcccctcgttctctctcaggtgctcccagggcttgagactcttctgtccccatggctactatgccatggggacagagtccagagtcctagtacagaagactatgctgggccagccaggcgagcaggactagctggggctggtgaaccccccggccgggtcagaatctgtgctacagcagtgagacagagctctaggctcactgcccttgttcttgttccccatagacttcccaaaagttcccaagggtgcctcttcccagaagagagtccccaagtgaagagaggctggagcccaagagggaggtgaaggagcccaggaaggagggggaggaggaggtgccagagatccaagagaaggaggagcaggaagaggggcgagagcgcagcaggcgggcagcggcagtcaaagccacgcagacactacaggccaatgagtcggtgagtgtgaccaccatgggctgagcccagggcaagcagggtggagctgggcctgggggcgtgggagggagggtagagcaggactgtgatcctcattataatcataatagcaggaaatgtgtgaagtactttgtgctgttaactcatttaatcctcactaccctatgtggttaggtattactgttattcccattttatagatggggaaattgtggcccaagataacacagctagtaggcagcctgaatccagagtctgcgattaatttttatactctactgcttctgtatctgagattcagagggaaaaaggttttgtgaaaacccagtaggtatgtgggtcactgagggagcattggtggtttgcagacagggctcccctaagagagccagagtccctgacaagaatgagactgagctgagaccatgggaatgacaatcataggccctcaggcatgatctctgcaaagtgctttcatttccattatctcattagttcctcacactgcagagttaacctctactctgcagatgggggaaagcagttcagagatgctaagtgacttgccccaggtccttggactcctagtgcagtgctctgtccaccatatcacaggccaagaaacaagactactggccatagttgctccttgccagggagagttctcccagaaaggggtaaggaggggaaggggtttattggggagctgctgcttttttagagtctttttttttagaaatgtatgtagtaggccgggcgcagtggctcacacctgtaatcccagcactttgggaggccaaggtgagtggatcacctgaggtcaggagtcgagaccagcctggccaacaaggtgaaacctcatctctattaaaaatacaaaaactagctgggcatggtggtgcacgcctgtaatcccagctactccagaggctgaggcaggagaatcacttgaacccaggaggtggaggaggcggaggttgcagtgagccaagatcatgccactgcactccagcctgggtgacatagcaagactccatctcaaaaaaaaaaaaaaaaaaaaggaatgtgtgtagtacactcatgcttacagagctcccataaactgtaaacacacggctgtgtgcccacttctgagcctcgaccacctgcaccaagagctgtgctctgtgtagcgctctacagagttctgttgacttttgtgaactttcccatgagggtgccacttctgatggccacccggggcttccccagccgaggtcacctctgctccctctgctctgcactctgacccctgcccttgccctgtttggtgtccctgcagtgcgctgtcctgaagtagctacctgcgcatctgtcccttccaccagatcctcagctctgagggcagggatgcctgtgtcaacctctttgtccctagcatctggcccatcacaggggcctgaatctcatttatagaacagggcatgagcggactaaatgacagaaaacatcaacaggtaggtgcttcattaacccagagaccaagatcccctgtcaggcgcatcaaggcctctagcagctcgggctgccccacagaattactctagcagcaactttgtaaacgatagagctgaccagagatgcagagttggaggaggcaatggtcgtcatatccctggaaggacccaagtgcatgctaggtgactgtttggcaggaatatatatgacttttcaggcccccggttccctgcgattttagaattccagatctgcgcttgctcagatcactcaactctccttgtttgattttcttcaggccagtgacatcctcatcctccggagccacgagtccaacgcccctgggtctgccggtggccaggcctcggagaagccaagggaagggacagggaagtcacgaagggcactacctttttcagagaagaagaaaaaaa

SEQ ID NO: 1681 - DNA, 3270 bp, Homo sapiens
aacggccctgccccaagccccagaaaaagaaactcttggagggagtctgcgggcttctctgagaaggggcgcagcctgacacctgtgctgtccctgcagtctctaggcctgtctgagctgctcccgtgaccgtgtcctgagtggccacctcctccttgggagggaggccgcggcaggtactctccctttgctgcttgctggcggccttgctagggctagaaagttttctcagcgttgggggaggggctagcgttcttgtccaaagcactcatcctgctgcagggaagggagctgtacggaggctggaagctgcagggttaggcccgagagagcttttgacaagcctggctcttcctgcttcccacctttttggctgaatacctttgggtcctggaggctgccaagggcgcttcgccttgagcaggtcccggagaggctcagcctgcccctcctggggccagcctccttgcctctgctctgacctcagcagctacacctaaccccaccgcaccctacccagtgtcgatatccacaacccagcccccaggcctgcactttggagatttctggatccttccctgggagggagaggtctcctaactcgattggacaggagccttcattccttgactcgtgtcatttgggagctatttatttattcttagtatttaatttttaacatcctctcagggaccaggggcctcctgcttttcagaggcccgagtgcatttatcccaaaacgaggcatcttgacatcccctatccccaccccctaaattcccaaggccctaaggtccctcacctggttgctctggaagctcttgctgataggaatgatagcaacactgaaagagcgtgggaaggtggagggtgtcaccagacccacacagagcaagggagattaaggcagttcttgctgccccttctctggctgtgctttgcctgagggaagagttggcaagaggccagaattctagtttggtttatggggcctggattctggcttgaagaagccatatttggcatgggtgaagtgaaagggccaggaggttctggaggccccttcacttccagtcccatagcggggctcagctatttttctgatcttattcaactttagttgtgcaaaagaaattctaagtgaatgcgcgtatgacaggtcaacgtattaggaaggagccagaaagtattcatactgctactccttatgagatagccaagaagcatcatgtcagtaactgggagtggagagggagttttgttttgaaactatgcaggtatttttcagcatccatttgtacattagtatggttctacaggaccccagctgtggaagtaacaaatttcttctccctccagactcttggatgactacctagatccccagcttaccggttagtttcctccacaggcttccatgagctcagtgtcccaagacagcaaaaatctggtataccctgtagaagcaggggggtagcaaatttaggctctcttcgaaattacttgtacaatacgagtgccttcgcagcttagccccaaagtgctacttatgtttcccaaggtcttttctattcaaatcatatttggtttcaggcccctttatgggcatacggtaacagaaacctccatcattcatatgagacccttttgtcagtggtaacatcttgtacttggaaaaaaaatttttttttttttttttttttttttttgagacagagtctcattctgtcgcccaggctggagtgcagtggtgtgatcttggctcactgcaacctccgcctcttgggttaaaagaattctcctgcctcagcctcctgagtagctgggattataggcacacaccaccacacccagctaatctttttgtatttttttttttagtagagacagggtttcgccatgtcggccaggctggtcttgaactcctgacctcaggtggtccacccgcctcggcctcccaaagtgctggcattacaggcgtgaaccaccgtgcctggccggaagtctttaaaaaataaagtgattctactcttctaagcttacagagaccagaccaggtgaatgtaactggggaaaatcaagatggtacctctctgcattatcccgccagacactgtattttatgcattcatgtctaggatacagtgtgaaaattaaaaagtttagagggcagatgcaattgtggcaagtgacctgccaataaagcaggtgcagctatagaagctggcataggtatatccttaatggtgctttctccctgggcttgtctttttgttgtttttttccccctatattcagagctccttgagaagtgataaacacctccagctttctaacatcctccccacaccatctcaccatatccatctcccagcatccatctgcattcagctaagggcgggaaactgacctagtgcctgtgttgcagaccatttctgaggtctccaccatccaaggaggcacagccgtcattactgtcctccatgccttcagcagcccccctcacagctaaggtacataccaccccttctgccgcgcctccacccctggcaccaaggtcttctgctgcttatgtctaaagggatcacctatatttaactgcctcagtgacctaacctctttcttctcatgtgccagatgttaagatgaaggaggaatacaacacatactcaagcctcagcctgtttagttgttttcactggggctcgcttttctgggacggtatttattatcagactggcaagcctaactccataggtttacaggaagtagggatatttttataaaacaattgtgtcctccccacattttgctatgttaatatttgcttctaacaatttgcagctgtttcactttttcctcatttgtctctaagttgaaggctttgttggaggggacagagcacaggaacagccttgacagtctgtaattattgtacagatattttaatagcatataaataagtatattccttttattttgaaacaaaaatgatcagacactgccttttgtgtgtttgctgcctgtggcatccttttttaaaaagactgttacatattaaaatagtgtacatatataaatattacctcttttgctgtacagttgtgatagagactgaagattttattttttgtgtgctttttataagaaaaaaattaatacactaaagaatcttgctgatgtgattgtaatgtacctatgtaacttatttacttttgaatgttcttctgtatctttaaaccttttattaaataaggttttaaaaattca

SEQ ID NO: 1682 - DNA, 8918 bp, Homo sapiens
ttgagaaaatctgtcacaaggcaaaattttattttttcaagttacaaaaataggagcatgtcaaaaatacagtctagtccttatacgagtagttccagccatttaaaagttatacagagtttggaaaaagcagtttatatacaagtcttaaaacacaacaatcatgaacaatgcacaccgttcaatgtagttattgctagttatatgcagcttttagttaccattgttcttctctgtaagggaaaggacagcatttggacattctgattgttgctgctgaagctgtggttttggaaaatcaatccaaaataagaataagctcactatgagtagaataaaacgtgtaagtttcaatcagtactacaagaaagcatggtttaaatttgagttccatacaattctacataactctattttgttactataacagaaatacagtgtatagttttgggcaagagtaaatgaattactggttttataattaagtgaaaagaaacagtttttggttgcaatgtagaaacaaagctggcatatctagcttacaaacattaaaaaatggaaaagatatttaatgtttaagcaaaagctgaacctaggttatttacctttagaaattaagagataaagttaagcattttgttcttttgaggattatcatgaagatttgctattctctattttctttttaaaaagaagagttatccacatagcgggaacatattttgaaacagatctatttgctcaatgtcatatggaagaacaaatcacaaaattaaataattctacctttaaataattaaagataatgcagttgacagtacaaagcactgggaaaaaatcacttatttgggggatgtgtgatacataagaaactttgggcctaaagttcacatggaagactggaagacttaaaatttaagggtgtcaccaaaagataacaatggctttgactccaactctcatgttagaccctgttaaaaggttaggtttattgctgttattttaccccagtaagttattgaataaatggagatatacattggtgataagtatgaggtgaagtaaaaagatctaaaaatattagtcttagaacaaaaatgacactcatgatcacttggcaaggatacttatttacttagtgatttaaatcctaaaaataagctacatttttaggaggtagaaaacaagtaccaatagtttaccatttggccaccctccttacttttggcttcagccttggatttctatttctcattccctattctcctgttaaagctattagttctactaccattcattacctaaatgtatagacctggagctgccaagaaaaatctttttaggaagctttgcttttaagccaccaaatgcacccaatactcagatatcaactgagaacgttttgcacctctctagttgattaatttacttcacacaaaaaaatgccaaaacaaaaattacttaaaatgaaaaacgaccactgaacatctctatatgcaattccagtatgtcagagtagttatgtaaacctaaatctgtactattttcactgaactgatttgaaaaagccatatattaaaatggcattaccagtgttaactgaaaacaggcaacgtgttttactagaaaattaacctaataaccaaaaaactccacttcttcccagagtgttatattgtgctgacatcccatagataatattataaaaagattttatttttgcaataggctgggttcacagtgagtatgttagtaccaagatcatgtgtttaatattattataagaatgtcattagtggaatgtatataaggcatgtaaaaaaatagttttaaagctcttagagggcaatgctccaaactggcagctgctagaaaaggtgctgacaggaatagaaaatattaaagaaatttagtttcagcacatattatagtgcttctacaatcaaaataattcacataaatttcaattgctggaactaatggaccaaatgagaatggacttttgcccctttaactactagaccaatcttgaaaacggaagcaatcacttgcaatcttccacacagtattgttgggagtggactgagcagtcagcaggaagttctggttgaagaaatgttgtttgtttccatcaaacttcacagttccactggtcacaacaagaactgtagtttgggactgagttgcttgctcttcatccacattaaaaaaaaaagagaacacatcattttctatctctaaataagcagattttcaggcttaaaatacattgtttatggactaatgcttaaaatttttttcatacactttctgtcccttgagcataatcttaagcatgcatactcaaacccagaaaactaagtacttagtaaaagatattaaaattattttcagtccagaaaactttgggatactctagtttcaaaatgaggagcttatatctagcataggaccatttgcttcatatatatataaatatttcagaattaatatttcaggtttctaacagagcttattcatgctttgcttcttaaactattgttcttttcaggaattataaaggaaaaaaatcaccctgaactacaatttaagacacttaggaccccacctagaggttttattaaactgtatcaatctacctggaatcaaattttcttgtaaaaagtcatcctttcacataacagagtaaatttctgtgaaatattagtagattgtaagatactgaacacattaatcagagatatggtataattttactctggagacatttcagggtccagcaggcaactatttagagaaatcagataatctttccctgccatttacaaaaatcacattaatctcaacttttcatacaacttttaataagccaaaatcacataatccatcaaaagctactagtggaaagaatctgaaggaagaccaaagtttgactggacagttacatttttcataatatttaacttgctcaagtaagtaaatagttctaccactaaaagtttctcgctgcttttggtgtaaaagctcagtgcttactagaggaaaacaaaggaagcatcttgaaagatcatgatcttaccatgaactggttggcaatctaacatattgacctggaactcactagaaggcaatgtgtcaaaaaaattatttagggcatccagccctgaaacagcatttccattccatattaaggtggccttgtccagatacagcctggttagtgcctaaaaagaaagacaaatttaaaaaagggaaataattctgtttctagataaacattttatagaaatggattaaaatattacagatggtatataaacattttttgtagttctaccttcatctccactccccttgctccatctccactggaaacccatgtgaacaaaacgtctgtcttataatcttggccttaaataaatatcaccttactctttataaactaggcagtaaaatatattttttcatatttcactttagacacaataaaaccttccacccaattaagttctgctttctgtattcaaatgaattaaatgatcacaaattccaagcaaatgcagccccaagccagttttagtgtgtcttccttttgtaattatgagaattaacaaagtttttgatcaagccctacctgtaccctttaatgctagtggctatatatatatatgaaacatttaatatttgcatgtgttagaaagaattagttcactactcccactttttagagaagaggtttatgttttcttaaaaattattctgttttttaaaaaaattgagacagggtcctgctctgttgcctcaggctggtctcaaactcttggggtcaagaaatcctcttgcctcagcctcccaagtagctggggttacaggcatgtcataccatgctcggctatagtactactctattagtgtacttagttcaaaagaatcatgagtacttgctaaagcagagacttcgataagtcaaataagttaaggcccaaatgaggcagaaattccacagttaaaactctggggtcacaagacacactattagcttaattctataatgtaacttgggttaaaaggccaggcaggcatggtggctcacgcctataataccagcactttgggaggctgaggcgggtggatcatgaggtaaggagttcaagaccagcctggtcaagatggtgaaaccccatctctactaaaactacaaaaattagccgggcgtggtggcagttgcctgtaatcccagctacttgggaggctgaggcaggagaatcgcttgaacccgggaggcagaggttgcagttagccaagatcgcgccactgcactccaacctgggtgacagagtgagacaccatctcaaaaaaaaataaataaataaaaataaaaaaaaaggtcaacacatatattgacactggtaataaacaatgttgtctttttttttctactttattttttgaaagcagtaaggtacaatacacattcaaggcaaggcacaataaacatccattgtcacaacccttttccctgacatcaaatatcagtacaagaaacttcttttatcttttgccttaaaaaattggttttcacctgacaaaaacaagcaatggggaaaggattccctatttaataaatggtgctgggaaaactggctagtcatatgcagaaaactgaaactggaccccttccttacactttatacaaaaattaactcaagatggattaaacacttaaacgtaacacccaaaaccataaacctaggcaatatcattcaggacacaggcatgggcaaagagttcatgactaaaacaccaaaagcaatggcaataaaaaccaaaattgacaaatgggatctaattaaactaaacagcttctgcacagcaaaagaaactatcatcagagtgaacaggcagcctacagaatgggaaaaaatttttgcaatctattaatttccaaatctacaggaacttaaacaaatttacaagaaaaaacaaccccatcaaaaagtgggcaaaggatatgaacagacacttctcaaaagaagaagtggccagcaaacatatgaaaaaatcctcatcatcactggtcattagagaagtgcaaatcaaaaccacaatgagataccatctcacgccagtcagaatggcaatcattaaaaagtcaggaaacaacagatgctggagaggatgtggagaaataggaatgcttttacactgtgggtgggaatgtaaattagttcaaccattatagaagacagtgtggccatttttcaaggaactagaaccagaaataccatttgacccagcaatcccattactgggtatatacccaaagtattataaatgattctactataaagacacatgcacacatatgtttattgtggcactattcacaatagcaaagacttggaaccaacccaaatgcccatcaatgttagactggataaagaaaatgtggcacatatacaccatggaatactatgcagccataaaaaaggatgagttcctgttctttgcagggacatggatgaagttggaaaccatcattctcagcaaactaacacagggacagaaaaccaaacacagttatgttttcactcataagtaggagttgaataatgagaacacatggacacagggaagggaacatcacacacctgggcctgtcagggggtggggggctagaggagggatagcattaggagaaatacctaatgtagatgacgggttgatgggtgcagcaaaccaccttggcacgtgtatacctatgtaacaaacctgcacattctgcacatgtatcccagaacttaaagtatatatatatataaaatcctatgcttaataaatgggttttatataaaaaataggtttttagagatagggtattaacttttgcagctgcaggacagaagtagttctccaaagcacagttctatgctggtaagagacctaggcaagactcacttgaccacatactgacataattacgtaaaagatatggtgcagggataagttgcaatgaaaaagctgatgaaatctcggtctgttgaggacttaatattatccatgctacatgcatactttttgtgggtgtaagctatacttttgagccatgatcagaaattatctataaatatatgaaataaaaggggcgaatcaggaaatattccccgtaatgacccaccccttcattagcactaataataccttaaccatattggttaattgatggaactaagaaaaggaaacatatttaagaaaatatgctgggcctaatgttaagtgcggtattttaattaattcatacttaccaacctgaaaataaaatgaggttaagggaaaatggcaacttgctccaggtcaaagaactaggtaaaagtaaacctgggatatgattccagagcccatgttcccactaatgccataccaatccttccctgagcaatttgcttttaaagagtaaatccacagttaccacttatgcaagtcagatgaaacgctggctccagacacaacctggtatttaataaagagtagtagtctataaagagtagtagagtctataacactcacccgtcttcttttatccattgtctcatagtaaatattgacaaactcctcagcagctctacatgcctgatctacataagttttaaaatcctacaagaaaaattccagaagtatagattaccaaccttttcaacccctcacaaacacaaaaccactgacagaagctgatgatttatttcaaccactatgtagctctatatacagtccacattctttcatataaattcagacattttaaaggccggactctgaagtttgcaattttaaaatttttcactaattttaagtgcatgtctttaggacataatcttctcaatgaatctgagtctttttcagtctccacatataaatttataatcttttcttggcaactaagcactttagactttcaatattttacaaacattcacggcaatgaaaatgacaccacctgaaccttagaaaaggagagagagcggcaaaaactgccactgaataagctaggaaattgttttctgttttcaagtgaggtgttagagccaaactccaaagttgatgaatgggaaacacacacacacacacacacacacacacacgaaagtagttcaactacttgaaaaaccggcagctccacttaggaaactttcccacattgcgtaaatattcactgctgtttgcctaagaactgtgacaccgaagaaagcaacgctgttggcgttcgtgccggagaattaaggaataccttccttctcattcatgtacggggcccagtctattactaaattaagaacaatgaatcgccagtttctttgtcaggtgactgaaagtgatttttagagaggaagataatcgagagaaagaaactgcaagccataaacaacaaaccccaacatccccgcctctcgctatttcccagctcagggtcctttccgggatcagaaagcgactgctaaccaggctgggggtggggccggcagggcgggcagcaaagcgtgggccccgccccgcagtgcagagagccgggacgtgattcgtcacctatccacgtgagcagcagccagaccgccccggaatccctcctctcagccactggagtccggcgcccagccgtcctgccacggcccaggcactcaccagagacgtggccatctgggaccttgtagcagtgtgttctggcagtgtcggcgtcactacctcctcacgtgtccggtccgcagggctgcggaatgatcaatacttatgaagagagcgaaacccgccaaacgcacaaaattttccaccctcccattctctcccggaagtagctcggtccgtcgttaaaagcacaccgatgttccaaccttaagttccacttcccttcagttcctgaagatccctcccatccaccttatctacttgtttgatacttagtttaaaatttaaaagccactttgcttttgtaaacatgatactcaacaggaaagtcccctacttttctaacgacaagcctggggacaagcaaaaatgaaagtgttcaattacagggacttttttgccccaggaggcggagccaaagccctctgaagaccaattagaaatgcgaggagacctactattccgtagcctataggataagtgggcagagcttggggaaaggcgtgcgtgactagtgaacaatttagcattctggaacgttctggaaggatcatcctcactgaattactacgttttggcagtatgcctaaaattactatttcattttaacccagccacattgaacaggaaaagttcatctggtttctccattctggcattttaaaatgtctcacggacaccaacaaaaattaagtttacagtgctattcaccatcttttaagggctatttattctgcaaggtattctaacaataactaaaatgtcgagtgctgactatatgtaaggtgcttttctaatcagttttacatatattcacttattataacaatgctgaggtaattgctattattttatcatcttcattttacagctaagactgtaaaatctgcctacggtcacaaactagttgagattcaaactcaagcaatataactgtcatggcaatgtggctttgctccccaacaccccttaaaaacctctcatcccaaagccgccaatgacttctgatttaaatggcaaattaattagatgtcgtagttttaccttgagtggctggtgtgtggcccctcataatagttacttcttctttggtatccttctctgtctccctgagaccagtggcttctgtattttctcatacttttaatctttctctttatctggctcttttctcttcaaggtaggactaacggaagcttcttctcagccagccagcttccgttttccgttaacctctgact

SEQ ID NO: 1683 - DNA, 8919 bp, Homo sapiens
ttgagaaaatctgtcacaaggcaaaattttattttttcaagttacaaaaataggagcatgtcaaaaatacagtctagtccttatacgagtagttccagccatttaaaagttatacagagtttggaaaaagcagtttatatacaagtcttaaaacacaacaatcatgaacaatgcacaccgttcaatgtagttattgctagttatatgcagcttttagttaccattgttcttctctgtaagggaaaggacagcatttggacattctgattgttgctgctgaagctgtggttttggaaaatcaatccaaaataagaataagctcactatgagtagaataaaacgtgtaagtttcaatcagtactacaagaaagcatggtttaaatttgagttccatacaattctacataactctattttgttactataacagaaatacagtgtatagttttgggcaagagtaaatgaattactggttttataattaagtgaaaagaaacagtttttggttgcaatggtagaaacaaagctggcatatctagcttacaaacattaaaaaatggaaaagatatttaatgtttaagcaaaagctgaacctaggttatttacctttagaaattaagagataaagttaagcattttgttcttttgaggattatcatgaagatttgctattctctattttctttttaaaaagaagagttatccacatagcgggaacatattttgaaacagatctatttgctcaatgtcatatggaagaacaaatcacaaaattaaataattctacctttaaataattaaagataatgcagttgacagtacaaagcactgggaaaaaatcacttatttgggggatgtgtgatacataagaaactttgggcctaaagttcacatggaagactggaagacttaaaatttaagggtgtcaccaaaagataacaatggctttgactccaactctcatgttagaccctgttaaaaggttaggtttattgctgttattttaccccagtaagttattgaataaatggagatatacattggtgataagtatgaggtgaagtaaaaagatctaaaaatattagtcttagaacaaaaatgacactcatgatcacttggcaaggatacttatttacttagtgatttaaatcctaaaaataagctacatttttaggaggtagaaaacaagtaccaatagtttaccatttggccaccctccttacttttggcttcagccttggatttctatttctcattccctattctcctgttaaagctattagttctactaccattcattacctaaatgtatagacctggagctgccaagaaaaatctttttaggaagctttgcttttaagccaccaaatgcacccaatactcagatatcaactgagaacgttttgcacctctctagttgattaatttacttcacacaaaaaaatgccaaaacaaaaattacttaaaatgaaaaacgaccactgaacatctctatatgcaattccagtatgtcagagtagttatgtaaacctaaatctgtactattttcactgaactgatttgaaaaagccatatattaaaatggcattaccagtgttaactgaaaacaggcaacgtgttttactagaaaattaacctaataaccaaaaaactccacttcttcccagagtgttatattgtgctgacatcccatagataatattataaaaagattttatttttgcaataggctgggttcacagtgagtatgttagtaccaagatcatgtgtttaatattattataagaatgtcattagtggaatgtatataaggcatgtaaaaaaatagttttaaagctcttagagggcaatgctccaaactggcagctgctagaaaaggtgctgacaggaatagaaaatattaaagaaatttagtttcagcacatattatagtgcttctacaatcaaaataattcacataaatttcaattgctggaactaatggaccaaatgagaatggacttttgcccctttaactactagaccaatcttgaaaacggaagcaatcacttgcaatcttccacacagtattgttgggagtggactgagcagtcagcaggaagttctggttgaagaaatgttgtttgtttccatcaaacttcacagttccactggtcacaacaagaactgtagtttgggactgagttgcttgctcttcatccacattaaaaaaaaaagagaacacatcattttctatctctaaataagcagattttcaggcttaaaatacattgtttatggactaatgcttaaaatttttttcatacactttctgtcccttgagcataatcttaagcatgcatactcaaacccagaaaactaagtacttagtaaaagatattaaaattattttcagtccagaaaactttgggatactctagtttcaaaatgaggagcttatatctagcataggaccatttgcttcatatatatataaatatttcagaattaatatttcaggtttctaacagagcttattcatgctttgcttcttaaactattgttcttttcaggaattataaaggaaaaaaatcaccctgaactacaatttaagacacttaggaccccacctagaggttttattaaactgtatcaatctacctggaatcaaattttcttgtaaaaagtcatcctttcacataacagagtaaatttctgtgaaatattagtagattgtaagatactgaacacattaatcagagatatggtataattttactctggagacatttcagggtccagcaggcaactatttagagaaatcagataatctttccctgccatttacaaaaatcacattaatctcaacttttcatacaacttttaataagccaaaatcacataatccatcaaaagctactagtggaaagaatctgaaggaagaccaaagtttgactggacagttacatttttcataatatttaacttgctcaagtaagtaaatagttctaccactaaaagtttctcgctgcttttggtgtaaaagctcagtgcttactagaggaaaacaaaggaagcatcttgaaagatcatgatcttaccatgaactggttggcaatctaacatattgacctggaactcactagaaggcaatgtgtcaaaaaaattatttagggcatccagccctgaaacagcatttccattccatattaaggtggccttgtccagatacagcctggttagtgcctaaaaagaaagacaaatttaaaaaagggaaataattctgtttctagataaacattttatagaaatggattaaaatattacagatggtatataaacattttttgtagttctaccttcatctccactccccttgctccatctccactggaaacccatgtgaacaaaacgtctgtcttataatcttggccttaaataaatatcaccttactctttataaactaggcagtaaaatatattttttcatatttcactttagacacaataaaaccttccacccaattaagttctgctttctgtattcaaatgaattaaatgatcacaaattccaagcaaatgcagccccaagccagttttagtgtgtcttccttttgtaattatgagaattaacaaagtttttgatcaagccctacctgtaccctttaatgctagtggctatatatatatatgaaacatttaatatttgcatgtgttagaaagaattagttcactactcccactttttagagaagaggtttatgttttcttaaaaattattctgttttttaaaaaaattgagacagggtcctgctctgttgcctcaggctggtctcaaactcttggggtcaagaaatcctcttgcctcagcctcccaagtagctggggttacaggcatgtcataccatgctcggctatagtactactctattagtgtacttagttcaaaagaatcatgagtacttgctaaagcagagacttcgataagtcaaataagttaaggcccaaatgaggcagaaattccacagttaaaactctggggtcacaagacacactattagcttaattctataatgtaacttgggttaaaaggccaggcaggcatggtggctcacgcctataataccagcactttgggaggctgaggcgggtggatcatgaggtaaggagttcaagaccagcctggtcaagatggtgaaaccccatctctactaaaactacaaaaattagccgggcgtggtggcagttgcctgtaatcccagctacttgggaggctgaggcaggagaatcgcttgaacccgggaggcagaggttgcagttagccaagatcgcgccactgcactccaacctgggtgacagagtgagacaccatctcaaaaaaaaataaataaataaaaataaaaaaaaaggtcaacacatatattgacactggtaataaacaatgttgtctttttttttctactttattttttgaaagcagtaaggtacaatacacattcaaggcaaggcacaataaacatccattgtcacaacccttttccctgacatcaaatatcagtacaagaaacttcttttatcttttgccttaaaaaattggttttcacctgacaaaaacaagcaatggggaaaggattccctatttaataaatggtgctgggaaaactggctagtcatatgcagaaaactgaaactggaccccttccttacactttatacaaaaattaactcaagatggattaaacacttaaacgtaacacccaaaaccataaacctaggcaatatcattcaggacacaggcatgggcaaagagttcatgactaaaacaccaaaagcaatggcaataaaaaccaaaattgacaaatgggatctaattaaactaaacagcttctgcacagcaaaagaaactatcatcagagtgaacaggcagcctacagaatgggaaaaaatttttgcaatctattaatttccaaatctacaggaacttaaacaaatttacaagaaaaaacaaccccatcaaaaagtgggcaaaggatatgaacagacacttctcaaaagaagaagtggccagcaaacatatgaaaaaatcctcatcatcactggtcattagagaagtgcaaatcaaaaccacaatgagataccatctcacgccagtcagaatggcaatcattaaaaagtcaggaaacaacagatgctggagaggatgtggagaaataggaatgcttttacactgtgggtgggaatgtaaattagttcaaccattatagaagacagtgtggccatttttcaaggaactagaaccagaaataccatttgacccagcaatcccattactgggtatatacccaaagtattataaatgattctactataaagacacatgcacacatatgtttattgtggcactattcacaatagcaaagacttggaaccaacccaaatgcccatcaatgttagactggataaagaaaatgtggcacatatacaccatggaatactatgcagccataaaaaaggatgagttcctgttctttgcagggacatggatgaagttggaaaccatcattctcagcaaactaacacagggacagaaaaccaaacacagttatgttttcactcataagtaggagttgaataatgagaacacatggacacagggaagggaacatcacacacctgggcctgtcagggggtggggggctagaggagggatagcattaggagaaatacctaatgtagatgacgggttgatgggtgcagcaaaccaccttggcacgtgtatacctatgtaacaaacctgcacattctgcacatgtatcccagaacttaaagtatatatatatataaaatcctatgcttaataaatgggttttatataaaaaataggtttttagagatagggtattaacttttgcagctgcaggacagaagtagttctccaaagcacagttctatgctggtaagagacctaggcaagactcacttgaccacatactgacataattacgtaaaagatatggtgcagggataagttgcaatgaaaaagctgatgaaatctcggtctgttgaggacttaatattatccatgctacatgcatactttttgtgggtgtaagctatacttttgagccatgatcagaaattatctataaatatatgaaataaaaggggcgaatcaggaaatattccccgtaatgacccaccccttcattagcactaataataccttaaccatattggttaattgatggaactaagaaaaggaaacatatttaagaaaatatgctgggcctaatgttaagtgcggtattttaattaattcatacttaccaacctgaaaataaaatgaggttaagggaaaatggcaacttgctccaggtcaaagaactaggtaaaagtaaacctgggatatgattccagagcccatgttcccactaatgccataccaatccttccctgagcaatttgcttttaaagagtaaatccacagttaccacttatgcaagtcagatgaaacgctggctccagacacaacctggtatttaataaagagtagtagtctataaagagtagtagagtctataacactcacccgtcttcttttatccattgtctcatagtaaatattgacaaactcctcagcagctctacatgcctgatctacataagttttaaaatcctacaagaaaaattccagaagtatagattaccaaccttttcaacccctcacaaacacaaaaccactgacagaagctgatgatttatttcaaccactatgtagctctatatacagtccacattctttcatataaattcagacattttaaaggccggactctgaagtttgcaattttaaaatttttcactaattttaagtgcatgtctttaggacataatcttctcaatgaatctgagtctttttcagtctccacatataaatttataatcttttcttggcaactaagcactttagactttcaatattttacaaacattcacggcaatgaaaatgacaccacctgaaccttagaaaaggagagagagcggcaaaaactgccactgaataagctaggaaattgttttctgttttcaagtgaggtgttagagccaaactccaaagttgatgaatgggaaacacacacacacacacacacacacacacacgaaagtagttcaactacttgaaaaaccggcagctccacttaggaaactttcccacattgcgtaaatattcactgctgtttgcctaagaactgtgacaccgaagaaagcaacgctgttggcgttcgtgccggagaattaaggaataccttccttctcattcatgtacggggcccagtctattactaaattaagaacaatgaatcgccagtttctttgtcaggtgactgaaagtgatttttagagaggaagataatcgagagaaagaaactgcaagccataaacaacaaaccccaacatccccgcctctcgctatttcccagctcagggtcctttccgggatcagaaagcgactgctaaccaggctgggggtggggccggcagggcgggcagcaaagcgtgggccccgccccgcagtgcagagagccgggacgtgattcgtcacctatccacgtgagcagcagccagaccgccccggaatccctcctctcagccactggagtccggcgcccagccgtcctgccacggcccaggcactcaccagagacgtggccatctgggaccttgtagcagtgtgttctggcagtgtcggcgtcactacctcctcacgtgtccggtccgcagggctgcggaatgatcaatacttatgaagagagcgaaacccgccaaacgcacaaaattttccaccctcccattctctcccggaagtagctcggtccgtcgttaaaagcacaccgatgttccaaccttaagttccacttcccttcagttcctgaagatccctcccatccaccttatctacttgtttgatacttagtttaaaatttaaaagccactttgcttttgtaaacatgatactcaacaggaaagtcccctacttttctaacgacaagcctggggacaagcaaaaatgaaagtgttcaattacagggacttttttgccccaggaggcggagccaaagccctctgaagaccaattagaaatgcgaggagacctactattccgtagcctataggataagtgggcagagcttggggaaaggcgtgcgtgactagtgaacaatttagcattctggaacgttctggaaggatcatcctcactgaattactacgttttggcagtatgcctaaaattactatttcattttaacccagccacattgaacaggaaaagttcatctggtttctccattctggcattttaaaatgtctcacggacaccaacaaaaattaagtttacagtgctattcaccatcttttaagggctatttattctgcaaggtattctaacaataactaaaatgtcgagtgctgactatatgtaaggtgcttttctaatcagttttacatatattcacttattataacaatgctgaggtaattgctattattttatcatcttcattttacagctaagactgtaaaatctgcctacggtcacaaactagttgagattcaaactcaagcaatataactgtcatggcaatgtggctttgctccccaacaccccttaaaaacctctcatcccaaagccgccaatgacttctgatttaaatggcaaattaattagatgtcgtagttttaccttgagtggctggtgtgtggcccctcataatagttacttcttctttggtatccttctctgtctccctgagaccagtggcttctgtattttctcatacttttaatctttctctttatctggctcttttctcttcaaggtaggactaacggaagcttcttctcagccagccagcttccgttttccgttaacctctgact

SEQ ID NO: 1684 - DNA, 384 bp, Homo sapiens
cttctttattagtcttactagtactctatctattttgttgatcttttcaaaaaaccagctcctggattcattgattttttgaagggtttttttttgtgtgtgtgtgtctctatctccttcagttctgctctgatgttagttatttcttgccttctgctagcttttgaatgtgtttgctcttgcttctctagtttttttaattgtgatgttagggtgtcgattttcgatcttttctgctttctcttgtgggcatttagtgctataaatttccctctacacactgcttcaaatgtgtcccagagattctggtatgttgtgtctttgttctcattggtttcaaagaacatctttatttctgccttcatttcgttatttacccagtag

SEQ ID NO: 1685 - DNA, 384 bp, Homo sapiens; identical to SEQ ID NO: 1684

SEQ ID NO: 1686 - DNA, 200 bp, Homo sapiens
tctcttcacctttcatggtacacgactcggtggaaataaagcagttttgaagagagatctttgccatctcagaagaatcaagagaagtttccatttctggaggatcgggttcctctatttgtgctttttgactatggatctctaagactgatattgaactatctgcatctttcctcaaaggggctgtttctttctcaagc

SEQ ID NO: 1687 - DNA, 618 bp, Homo sapiens
cagcacgctgagcgagctctttagcgcctggctctatctcctccagctcactgtttacccaaatgcgcaccgcctgaaatgtacgggtacgcggcatgtttaaacttatctttcaccggcgttgcagcagcccgactttccgacagttgctttggtgcgggtcatcggctgttcgcggttacgctcgacaatggcgcgggcaatgcgtttggcaaaacgctcttcaccataggttttcaatacccaggcgatatcggcttcttctgcggtttgtagccattcagcggctgactgcccacgggttgggtccatacgcatgtccagcggaccatcgcgcataaaggaaaagccgcgctcagcatcatcaagttgcggtgaagagacgccaagatcgaggagaatgccgtcgatcttgccgataagatcgcgctcggcaacgtattcgcccagcgcggagaaaggtccgtgcatgatgtacaagcgcggatcatcaatagtcttcgcaacggcgatagcctgcgggtatcgatcgatcgccagctggacgcccctattggcccatctgcgagaggatcagacgtgagtgcccgccgcgaccaaaagtcccatcaatgtaga

SEQ ID NO: 1688 - DNA, 253 bp, Homo sapiens
gcagtccgcgggaaaccaaaatggcgaggggctgtattgaagtgggctgtgtttgaggccggtgtaagaacgctcattctacccccaacccttgtctccaaggacctcggtttgtgcgtgcatatgtgcccggtacccggtggggcgggtgcccaataagtgctcggactcgcaggggaagcgcccacggggacggattggtttgtttttcctgtatgaagcggttggccaccactgaattgaccgaatgaag

SEQ ID NO: 1689 - DNA, 8906 bp, Homo sapiens
cagctgtgtgagaagccgggcagcctcctgctctgtgaaggaccctgctgcggagctttccacctcgcctgccttgggctttcccggaggccagaagggaggttcacctgcagcgagtgtgcctcaggcaagttcccacgggcgggcagctctgcagcctggccggccacctgctcctgcaaccccctgcaccaagtcctgccctgagctgcctgcagaggacaagccccctccccacccccaccgcctggccctctctggagcttgtagcccacagctggcaggtgtacccacctctcagtagctgcagggtttgctctgatttcagtcgtatgtgcccccttggtacctttccatcaggtggcgggcagggtggcgggatgacaggtcatgggcttttcatcccgtgggctggcctgagcctgtgctatgtgtgaggcggccaccacagggcactgccgctcagacagtgcagcattaagggtacaggtaactggttggtcaccgaacactgaagtccataggaacatggagttctttatgaagacacagtgtcacctgagctcagttcaacagaaagaacagctccaggcttgtcctgggttgtcagtgctgttgttctgcctccatgttactgcatcaggtgtcgcccggcacatctggggtctgtgaggatgatgagaggacacctgcacagccgtggccttcctgcctactcaccgggcccaaggagtctcctatctcacgtcagaacacttcctgggtcaggaagacacctggagagtctcccaggccatggcagccccacagcagcacctcacttatgggagtgtctgtctgcctgcccagaatgataagtgactgctccaccactggccagctgctctcaaggaggaaaggcctcttttcataggagcccctctttcaagcttcttgccagttagactgggcctccccagccaggctgcctagtaagattctctgtatttcaggtgaagctggagctcagatcgcagcaaggtaatccttgatggctggatctttttgctggagaatgcttggactagtgagcaaggttggaaacagggccaggtgctttagcagcatggctgcctctgaagaggagttgcttgattttagtggctcagaactgcaatttaattcttgttctttgcacctctctctccaccccttctttaactttttgttagggattcactctgtttcgtgtgtaaagagacaagacagagttaagcgctgtgtggtaactcagtgtggaaaatttaccatgaggcttgtgtgaaaaaataccctctgactgtatttgagagccgaggtttccgctgccccctccacagctgtgtgagctgccatgcttccaacccttcaaacccaaggccgtcaaaaggtacaggtgcacctgcgcagccttgctgtgggttcagatgcaggccagacgcaggcccatgggcgcttgggaaggtgggctgttgggattgtcaccaaagagcattaattatcttgagtgactaactggacatcggctgggttgggttttctttgacaaaggacctgtctcccttttcttctttccatcctaaatatcaccctaaagatgcttaactataggagaggggcaacctttggaccatttgatagattttgtttaccctggcttttttttttttctttatagagatagagtcttgctctgttacccaggctggagtgcagtgcagtcacagctcactgcatccttgacctcctgggctcaagctgtcctctcgggctcaagctgtcctcctgcctcagcctcctgagtagctggaactacaggcacatgccaccacacctggctgatttttgtaaatttttttttttttggagaaaaaaaactccctctgttgcccaggctggagtgcagtggcacgatctcagctcactgcaacctctgcctcccaggttcaagcgatcctcctgcctcatcccttcagtagctgggattacaggcacgtgccaccatacctacctaatttttgtatttttagtagagacggggtttcatcatgttggtcaggctggtcttgaactcctgacctcaggtgatccacccgcctcagcctcccaaagtgctgggattacaggtatgagccaccacgcctgccaatttttgtatttttttgagagagaggtttaccatgttgcccaggctggtcttgaactattaggccactgctctgacctcttttcttttttttggacgggtctccttccgttgctcagctagatgcagtggtgtgatcatggctcactgtagccttgacctcccaggctcaggtgatcctcccacctaagcctctcaagtagctgtgaccacgacgcctggctattttgttatttttttgtagagacgaggtctcactgttgtgttgcccaagctggtcttcaactcttgggttcaaagaatcctcccacctgagcctcccaaagtgttgggattacaggcatgagccaccacacccagcctgtttgctctggttttaatggcccattatatgtaagaaaacatctttaaatcaattacattggatttctaatgttaggtgtgtgggatgagggtggcaggttttctgacttcttgacccatggttctttatcgggcaattttgtcctccagggacatttggcaatgtctggggatattttggggatgtgctcctggcatctagtgagtagaggccagggatgctgctccacactgcacaatgcccaggtcggctgcccacgtgccccaggtgcctgcagtgcccaggctgagacacgcggcattttagatgtatgaccattttctcaaactggttttgaagcacctttgctctgaaagtttttttaaatcaaatactccatttcattttagcattaactttcaaattcatggaggctgagtaattattagttgctcttttcactatgactggagtcagtgtttggggtccttagggtgtgtttctttgccttcaggtaaaatgatgcggtgtgtccgctgccccgttgcctatcacagcggggatgcttgtctggcagcaggatgctcagtgatcgcctcaacagcatcatctgcactgcccacttcactgctcggaaggggaagcgacaccacgcccacgtcaacgtgagctggtgcttcgtgtgctccaaaggtgaggggcctgggggtgtctgcggcacacgcctctcacactcccaggagccacatatcaaggcaggctcattccttgtctgcgctgtgttcattgatgttgacagtgttctgtgcgtcttcacgttaatagtatatcacagtagctctaaattaattgtatcatttcgcaaacatcaggaaatatttgggtgaaaatgacatttgctctcggctgatgtcagatcgtgtttaaaactgatgttataagtaaggtgaataaggagactggaagcactgaatctgggctgagccatacagaaggctaagcctgccgctcccctctttgcagggggagccttctgtgctgtgagtcctgcccagcggccttccaccctgactgcctgaacatcgagatgcctgacggcagctggttctgcaatgactgcagggctgggaagaagctgcacttccaggatatcatttgggtgaaacttgggaactacaggtgtgagacatagaatcgtatgcttttatgtcttttctgttcacatgtgttcgctttacagtacttaaagtattgaaattattatcgctgtctctgaggagtctgtgaatcctgtttttaatatttataatagatggtggccggcagaagtttgccatcccaaaatgttcccccaaatttcagaaaatgaagcacgagattggagaattcctggtttttctttgggtctaaagattattactggacgcatcaggcgcgagtgttcccgtacatggagggggaccggggcagccgctaccagggggtcagagggatcggaagagtcttcaaaaacggtacggagatattcagatagagagtgagacagcactctcggcattttcttacccctatttctttttttaaatttgatctttatagaaatactggactaagcattcaatctgtttttttaaattagaaatgtttgcagtctggtttatttgttgagcatagaataagatacactgataacttttgtaacattggtttgtgattaatttcattaaaattctgtaaacctattattcagaattatttttaatactaatttacagaatgttccatggcttgcctttatgtaaaatgcagatctgaaggaagggtcctgttgtctcgaccttgtgcagcaggctcttgggggctcgctttaccttcagtgcatgaggaatcaggggtggtcaagcagacaaggtgcttggcctctgattccccagctggggtgggaggcaggagcaacgatgtggcatggctggctgatgacccacgtttgagggaggcaggatggggatgtgacccttcactggaggaactggaggaactggtatttatgatcggtcaagagagaatgaggccagtagagaaaacccgaggtgtgtgcatgtggctcgttcagggagaagcacacgctgtgttgcagccgggtcagtgctggctcctgtgtgactgcaggcggggacccgcgttttaaagcttggttagctccatgctgccaaagctttgcaggctgcactgatggtaggagtgcatggtgggcattcagagatctcataagatgggtggcattgaagattaaaaattattaaaggcgagacaattgagagtggacttatgtgtttgctgcgactgtcggcaaagtctcctaactgtggatgcaggtgtcctgtagagccagaaacctttgtggctgacttggggctgcaaaaacagggcagaccacagacacgtctagggttgacaggggctggcctctcttgggacggattgtaggggtgtgtgtttcctcggttcttgcttgagcctatggttaatctctcagaacccttttgtttcgagaggagctcagctgcatgtttttttgtttttgtttttttttttttgagactgagtcttgctctgttgcccaggctggagtgcaatggtgtgatctcggctcactgcaacctccactcctgggttcaagcaattctcctgcctcagtctcccaagtagctgggaccatacgcacctgccatcatgcctggctaattttttttttttttttgtagagaatggggtttcagcatgttggccaggctggtcttgaactcctgacctcaggtgatccgcctgcctcggcctcccaagtgcttcgattacaggcgtgagccactgcacccggcctcaggtgcatttttattttctgtctgagaacagcaagtcccaggctttgaccctggtgctttgtcttaggccaagtggaggacagggagctcccgacagaactctgccctgggcctgtcttgtagagagtgatggctgttctctgagcactcctttgcctcaacacttggccgcatttaaaatacctgcccactgacagttgttcatagactctagttttatgggaaccagaaactatacttaacattgaaagtttagagtgaactataaaaatatggagcttgaaaggtagttacctgtatttactaaaatctttactcctatttcattgactttttagcactgcaagaagctgaagctcgttttcgtgaaattaagcttcagagggaagcccgagaaacacaggagagcgagcgcaagcccccaccatacaagcacatcaagtggcgtgtgggagctgcgtgcacgcgtgtggagggagtcttccccgagggccgtgagaggttcttaggcacacccaggctatggctggggagaggactgtcaccagccaggatctgtggtgcctggcatggatggccacacaagagaccatgagcaaatggcatggggggatctgcatgggggttcttggatccgcctggagtgtgaggcttggcttggtagcttagagaagggttggggtgacagtcctgaccgggctgcttggagcaggaggagctgagggatgagcctcccacctgcaccaggctgttgccaagtgctgggagtcagtcacatacggccagggctcagtgactgagccccaaacacgtagatcctgtacctcagagagcaagatggcggggcggcaggggagcttgccagttctgtgtttattccagtgagctcgagagccccagcaggaggaagtgcagccagggcagggctctgtgagagctccaggcccctcagggctgcctgcgctcagagctggtgcggcaagccgcatccccaggagcctcgtggccgttcctgacgagtgtttgtgataagtgtgtgccggaggtcaggtgctctgcctttgcttgtaaaatgtgggctgcagtcaatatctttgtatgtaaagaaagtgctctgtattcatctttatataatattttctttgggatggattcccagaaacagaatcacagggtcagagagttgaaatgtttagattcttggggaatattcccagattgttctccaaaatgtacagtttgtcataccacagcagtgaaaagagtgtctttcgccacctcttccctaagattatgcatttctacccagctgattttcagctgtctctactgctttgttatttggttgcttgtctttcactaatagtaaaccacaaggtcatgagagcagaggctatgccctcctgcctagcactgctcctcctggggtggactcccatgtggcttgctgctggtgcttggtaaaggagagtcagaggatgggtcgggaagctgctcagaagagctcttaccagcgtttgctggacaccctgcagtgtactaagcaatcaaacgcttttttctcttcatcttacaatggcctggctggatacgtgtcagctcttgttcatcagcgatgtgcacagacactaagataaaataatgtgagggggcgttgtgatgccctgcctgcctattgtgctaagaaggcagaggagagctcctctgggatctggggagggctgttctgagtagtgtgtcctagccaggactctgaagctttctaaaaggccacctggaggctgggtaaggagaggcagtggtgggtgtgcaagggtattcggaaggctctcatgtgtggaccaagacagcttactccttccctgcaggtgaataagccttacgggaaagtccagatctacacagcggatatttcagaaatccctaagtgcaactgcaagcccacagatgagaatccttgtggctttgattcggatgtctgaacaggatgctgatgtttgagtgccacccgcaggtgtgtcccgcgggcgagttctgccagaaccagtgcttcaccaagcgccagtacccagagaccaagatcatcaagacagatggcaaagggtggggcctggtcgccaagagggacatcagaaaggtatgtgtcgttatcccctcccctgcttttgagaaatacggttcactgggtaattaggcctaggtttgcttgtggtggttttgtagtcatgtgagaatggtattttttggaaaaaaattttttttgtttttgttttgagacaggtctcactctgtcatctaggctggagggcagtggcatgattgtagttcactgcagcctcagaatcctgggctcaagccatcctcccaccttagcttcccaagcagctgggactacggcgtgtttgccatgccctataatttattttttttgagaggggcttgctgtgtgccaggctcatttcgactcctgccccaaaccatcctcctgcctaggcctcccaaagcaatgggattttaggcaagagcctctgtgcctgacctgaatttttttgaattgaattattacaattgaatattttaaaatgttacatgaaaggtatctgctataactcacacattcccttaaaacatgccttatgtcagaattctgatggttatttttatgaaatggaagatctgtgaagtgacccactttcctctgggctagtagccaggtgcttgggagcactcaccagcaggcgtaaggagattgctcttgtgaggggtggtcctggcacagtctaggaccaagtcgttggtagacaccaggacagttgacctcctgcctctgctcccagactgtgtcccaaggacatccagggactgagagacatgtagaactgctgaccctgatgtattttggcatgacccaggtccataccagggctgacccagcacagagagttcataagcctggtgccagttccagcaacagcacaaaagttgcttagaaacacctccccagcaccctgttcctcgcctgcctgactgctgattcacccagactcttgctttacatcctgtcagatactttgtagccattttctctgttgtggggatcaccgtgtaaagtgggttatgtagaagcttggttatcagacagcgctcctgagacaaggtcgtgtaggaagcaagggttggcatattgccacttcgtgaatacttaatactttttcattggcaacctttacatacagatatgtctggatcctttgaatttaattgatggagactttgtacacgccctccacgcaggtatgctgatgtgtgtggtgcccgttctaagtgatcatgatggggagtcttgagccccgacactgaggattggtcagcacgctttttgtcatggccacatgcttgtgatttccagggagaatttgttaacgagtacgttggggagctgatcgacgaggaggagtgcatggcgagaatcaagcacgcacacgagaacgacatcacccacttctacatgctcact

SEQ ID NO: 1690 - DNA, 31132 bp, Homo sapiens
taagttaagaaaaaagcctttaaaatgtttttaatacaaaaatactcatacacaattttccaaacacagctttccattttaaatgctattttcccccaactggcaagtctcaactctctatttcagtatatccctccccccaaaaagtgaatttcaagtttttaagtctaactatcaaacctggtgacagcacccagtattcctaaaaggaatctgaccttacattgtatgaagtttagacaccaataggcacatttaagtttgtatttaatttctgacggggcatttcacacctcaacagggtatggtgaggctgtgacaccccgtggacacagcattttactctactgactaacaaacagtcatcaactacactcacaggatcaagatatttggcaactgacagtcatttgcattaacttgaattataaaacaggtttaattctggaaaataaggtagtcctggaagatgggcactgcacacgccggggtttagatgtcaagacagacaaacactgcgaaggggacccagccagccatggacgggtgtcgccggaagaaaggccggcctgaggacggacagctgggttctcacttcaggtgcctgaagagtttcccccacaggtgaccacattttaagctgcccattcggacacatccccctgtgggcgcacacgggtgggtatgggtttaggtgcagatgctggtttcggatgccaaggaatcctgagggattggggcggtttttgtgttttgcttcacattaatgatggaggattgaagctgatgttcaggaagtcaccacgtcctcagaacaaagctgggcagggccgagagccagccacacccacggtcacagctgggggcgtggtcagccccagtggcgagaaaccctgcaagctcagggccgctaccccaaagcctggctccactgagttatcaacgggtattgtagagacattcaaagttagtgttacttgctcattagtttaacagtttttggaaagggggagaaacatatttaaaatgtttgcattatttccttcagaaaaatcataaaatttggaagtattatcaaagcgattaaaaatcacaagatttcactactgtccaacacaaaaataagttaatatctgctccccaaagtgcactgcaaagccgattctgctgttttgacgtaagcattggtagtcccttacctgccggaagggatcttttgggcaagtgacagcggggccctggggccttcgactctaaggtgtgtgtggggacactgcccggcctgtccctagaacaaccttccaagttagggcatcataaggagcataaatctatgagccgatccagtattttcttaggacactttgggagaagttagagtctgaactggaaagcactactcccaccctgtcttaaccggcgagtgcccctcagaggccacggccgcgcgagcaagtcagtggctacacagctcgtttcccctgggtcctctgtgtagttaactttgctggggaccctgatgggagaagggacagccaccagccagtgaaacttccagtcagtgctcagggaggcgtgggaccctgcagggccacacacccctgaaccccacgcttacaggtcacaaaaccacggagtagccactctcaggtccaaagacactgcagtttttaccaaggcataaaagatgccacagaaaatttaacaggagcctcagcagcagttttcaaggggagttctgtaaacttctctgcaagatggatgtgtcccccttaggttattttaagaaaaggccataaaaaagcacctgctgctgaatgttctctccctccctcccagacaagcagcccctcaggacacgtgggcaaaggcacacatggtgcccccttctcagggtgctccagacttcccagggtcaaggatccctcaaaaaaagaaccaagtcttaaaacatatgtagtactcagatagataggtctcactctgtagaactggaccttttaaaaactaaagtgaaatctcacaggagagtgggtgtcatacctggcctagaccagtgcccataacacacgtacgaggcacgcacacctgccaggcaggcctccacccccaggaccgcacctctcagtaggtgccctggcagagggcacatgtgatcagcagagactgcatcttccatcaccagacccacagagtgctgagatggaagccactctgggtggcaggagagctagactccgtctctctttagacccacgtgctggggtccccggggcctgcagcgccctacggggctccctaagttgtcacttcctgtgctctaagcagactgcggtctcacgccctgcaaagtcactcctttcgccatggagctcagggccgcatcagtaaacacacacttcagtcggtggtgatttgtgaaataggtttagcaaaaatatattgagaataaaaatcagaaactggtaaagaaaagccaaatgaaaaaaatatacaaagttatcccccaaatgttgataagaacctagcgagttcagaagataggcccaggtgagaagtaggcccaacccggccaggcctcgaaagtgctccgcgtaaactacacgttgaaagtggacgtgttattggcatttcattcaaatccatgaggagaaaaaactacgggaggaaatcttacaacaccattgctgccaccacctgcagggccagcttctcactagggatggaaaagaagcgtttctgaggaacaattcacattagtacaaaaaaatgatacagccatttccaaagagcagagtaatgatcacaatggcagtttcgaggaatccagggtcagtcctcacacgggcctcacccagcctctcccgagtggcgacggcgctgagagccagaaagggggcaacgcgaagacgagtttctagcgacccttgggaaaagcctacgctacacatttcagaggagattaaaacattccatatgccaattaactttaacctaaaaaaatagagtgggagggaaccttgacattcggagaaattcaagtgtggcggtaacgctgaggagtgaggctgtttgtccaggaacgctgagctgggctcagacggtcatcagtgcagacgcagcggacgctgctgaggatggctcagtggtggggaggcgctccctcccgaggaggcctgtacgtctgtgtcctggcggctcgagctgggtcctccgggccagttcatgctcgccctctcccgcaggcagggccggccgccctgcaccgcccctggatccggccaagcggccgcctggcgctatttgccctctgtgactctccgccagcccctccgccgccgcctcttccccttcggcttccctggctctggggggggcttctcagtcttggtgcttctgaccgatgccgcccctaagtcatgctcacagcagtaggaccgcccgtccggggtgcagctgaaggctgtcccgtcctggtgctccttacagaacgaattggggcagaggtggcaaaatgaagtcgaaggtttgccacacacgtcacaatgatgccaaggacattcccacttccctgcaacagaacacaagatgtgagcacacagaagtgatggaatcacgacttcaacattatcgtggttgaagatgacttacaactgtcaggtcaaatgaacacaaaatagtgctggctccagcgaacaggacgggcagacaaactgtctaccacagcccgggcgggctccctggcagggcctgttgactccacagtacctgccaggcccctaaggaccacctgttagcgtctctttatgtttcggcaactgagaggagctgtgccgggtgcaggagtgtcccccagcgcggcgtggacaggcaggggctgctgtgctgatttccatgtgacctgccctctcccaagggactgattttcaacttgggtattcatctttctggcatgactctgtaaaagctctgtcacgttagggaccaccctctcgcacccatggccaacacttttctctatcgtgtgtcatctttaccgtacaaaaatgtttttacacaaatatctgaattcttttttttttgagatggagtctagctctgtcgcccaggctggagagcagtggcgcaatcttggctcactgcagcctccgtctcttgggttcaagtgattctgctgcctcacccttccgagtagccaggattacaggcgcccgccaccacgaccagctaatttttctatgttcagtagagatgaggtttcaccatgttggccaggctgctctcgaattcctgacctcaagtgatccatccaccttggcctctcagaagtgctgggattagaggcatgagccaccgtgcctggcctggattttctttttatagttttgttttttgtttgtttggttttttttttttttgagtggagtcttgctctgtcgcccaggctggagtgcaatggtgctatctcagctttctgcaatcttggctcactgcaacctccgcctcccgggttcaagcatttctcctgcctcagcctcccgaatagctgggattacaggtgcatgccaccacaccagtctaatttttgtatttttagtagagacggggtttcaccatgttggtcagactggtctcgaactcctgacctcaggtgatctgctcaccttggcctcccaaagtactgggattacaggcatgagcccccgcacctggcctcttttgggtttcttgttttgggtaagggccatttaatttttcttctgtgattccacacagtcaagagcctcatggcgacacactgcaagattgtaacggaggtggctgcacccttaggtgtgagccatgatgtctgcgcaccgccagagtcatctcacgacccatttctcagactgtctcatcaccaagtggaacaagacgctactgttttcccactggcgcctgtcatctctgaaatgcgggtgctggaaggtggagcccactctactttccctcaaacagagccagagctgcagctccttcgtcaaccggcggagcctcctggtgcacagcaccatctctggggacagcctgccctgcacatccaggacaggggctctgggcccctccattcccactgtagtgcagccaggccaggcccctctgggctgccagggagacactgttgtagaggcctttctcctaggaggggctttagttcccagcgtcgcctccttcctggccgccccgcccccacagcatggatgagggccccaattctgcagctgggccttgggctgcctgaatccctcctggaggttccaggggctaccccgtcaccacatatcttctctgctcgatgcagagatctagaatgtgcggctggtggaacaaagaaaggctctgccaccctggatcagggccttcgctgcatgagcgcctgatgtgcctgcacccagatgaggcccggtcagcaggaagagcggcagcagccgccatcaggagcctgccacacagacacagctgcaagccaccgcgaggctgcacacccaccgaagggccgcttgccaaggcccaggcaggacaggtggtaggccttggtgcagaacttgcggtcacacagcaccagctgcccgccatcaccgcagcggaagcactcgtcctctgactgcctcttcccttccccttttgctctgcgccgcctcgttttcttcttggtctttttgcccttttcctctgatgaaagggtcgtcgaggtctagagtcaagaattaagcacagatcaccggaaagaattacacaggctgaagcaaatagggcagaagagcgagctacactccaggaacttcagagatctctgcaggtgcccaacactaagaggagaggagaggagtgtcctcctcgtgctccccagacatccttagactcactcgactcagcgtgaaaaagctgaacaaagactacgactagagtgagctttgtcggaagcctgcaatgacgcatctcagcagcatctcagcagacacacagctccaggatctgctgatgggacccactggcaaaggaggccaccacaggcagaacagctcccgcccgccacccagggtctcctcattaggaaattccacaggaacgtgggcacaggtgggcggcagtgacctgagggcagtgaccatcctcagcaacacggctgaggacagacaccggctcagggccgagctggtgccaccgccaggctttcaggaccaggttctacacagcacagggaaggggtgcaagagtgcccccccaaatctctgtccttcctggaaccttggaaggtgactgtatttggaaatagggtcattgtcaatgagatctgttaagatggggtcacacggtagcagggcaggcgctaagtcaacaggaccagtgctcttataagaagggcaagtcaacagtcatgttcgcagggagaatggttgggcggtgctgctacaagccaaggagcagcaaggactgtggccgccaccaggaacgggagacaggcctgggaaagagcctcccaaggaaccttcagagggcgcacggccctgcccacacccagaactgcgaaaccacgcgtctgtgaggcattgttctggcagccccaggaaacacgttcagtgaggaactcttaaccactggcctttgttgagagccatcctccccagcccacagcagggaacttgctcccacctgtcccggcaacaagccagcctggaggaagccgctgttcacgggggacacaggtctccaggagtgcaaaatgccaacacagagcctggggggaaggagggcgccacagccttacctttggtctatccccgaggaatccactgcaattggaggctccacaccggcagaccgttttttcattgcccagacaatcgaggttgtagttaaaagtcagctccgtccctgggagaagaggagacagacaccaaattggaaacacctgcctttctcttcaaaagctaaggggcgtgtattaggtcaacaaaaatactcttattatttttgtatctgtactggcttgacccatggcctttcaattttgcttggtaaaagagatattcaaaccaaaagagactccacatcagcacccacctcccccagagcctttccagtccagccccacgcagccctcagcgatggccactctgcccccatagccaggagccccatgcagggtccccagagcttgtacctgcaggaatgtcacagacggcaaacaggcccacacgagtgtccccattcactgtccacttgagggtctcacagttgggctggcagctgtgattcataaatcgagagtagtttcctttggggccagcgtctattatacggtcctgtaaggtcaagtgatatattcggtcaagtgttagcaatcgcatgttatttttaaagggaattttcaccatcataaagcacattgaacaagttgtgttccttgttgtactgaaaaccgtggtgtcctgtgtccactgagacaggacacccccaaaccagtcctgtttctcttgctcacagaggacaggtcaggaccacgtggagaggaccgagccttagtgagcgccggggaggacaggacagggagctggagctcccagcatcctccatgatggcaaacaagggagctaaggtcagcagcaacagcctagccaagtggcactcaaggacaagaacaagactcaccctggctgggcgcagtggctcacgcctgtaatcccagcactttgggaggctgaagcaggcagatcacctgaggtcaggaatttgagaccagactagccaacatggtgaacccccatctctactaaaaatacaaaaaaaattagctgggcgtggtggtggctgcctgtaatctcagctactcgggaggctgaggcaggagaatcacttgaacccgggaggcggaggttacagagagtggagatcgcgccactgcactccagcctgggcaacaaaagcaaaactccgtctcaaaaaaaaaaaagactcacccaaccgaaaaccagcaaaggatgcaaagaaacaattcccaaagagcaaatccaggcagaggtggagaaatgcagatccgagtgacagtgagctctgactttgcacccatggcgctgatgtggcgttggctgagatgaggggtggctgcagggccggcaggaaggctttcgaggcagcaacctgataagggccacgggaatcacaaatgcaagcacgatgtggcctagaactgacccactcaaatccaggtgcctggaggccaaaggcaggaactggagacaacatctccacccagcagcagggaatggacggccccggcctccacctgaggagccgccagatccaccgcacaaccgcgtggggagaaatcaaaaggccacataaagcgtaacagtcacgtgttcaaacaaaaccacgtgtgtgaacagggataaacactgggataaacatggtcccaggaagcggcaggcttcggagtcactattcacacgcggcctctgacacaactgcccacgcacccagccctggtgcaatctcccagggtgcccctgtctgggaccgctggccccgtgtcctttctacatacccacacaggccaccctttaaaaccagaaatggtaccagaatgtggttctctgcaagatgcttttcacaataataaaatgcactaatcaacccagagtgccactcttcaacacagaagtgggggtgctcatctgccctctgcagatgctttgtcatgacgcgctgagccgcggtgctgatgtgcacgttggcatgcacaccacttctgcagggccctggggacgaggacagcacggggcatgcacatgggacatgccaccaatgccaacaggacaacccagcctctgacgcctggcagcaccgtgtctaacctacattcctaccattaccagcggggcccagtgccacttccttcttatcgggccagttttcatctgtgggttgcccgccatgtcttgaccctgttttatttatcttaactgacttacagatgttccctagatattccaaacatcagacccctttataacaatatgtcggccgggcgcggtggctcacacctataatcccagtactttgggaggccaaggatcacttgaggccaggagttcgaaaccagcctggccaacatggtgaaactgtctctaataaaaatacaaaaaattatccagctatggtggtgggcaccggtaatcccagttactcgggaggctgaggcaggagaatggcttgaacctgtgaggcagagggtgcagtgagctgagattgtgccactgaactccagcctaggcgacagagtgagactccgtctccaaaaagaaaaaaaaatgtgtcaaaaactttcccatagcttcccagctcccaatggaatcttccgtgcacaatgtcttttctcacaaagctgcctccgccttatgcaactattttacccttttgcttcatgcgttttcggtttgctgagtagttgcatgcagcttttcccaccacacagattataaaatgcatctcccccactcctagctgttcaatccatctggaattggcctttataagtggtgtgaggggaggcatcagtgcgtggtacgtgggctgcccggccctggctttggccccactccccctggccatccgcctgggtttgggccccgctggagtcacaggaatgccatggggaacactgtcacccccaggacacgcccacccttcccacagtaaggcttcaagataaagcactggctagacctgcagatctttccttctacatggactttgaaattgcctgtccaggtatatttaaacgtttttgctatttttatcgcacctacaacgagcttgcactggggaagatttccaccctcacagcctctcctttcccagctgagacatagcctgtaccgccactcatccatatcatctcttgtgtccgtcagtgacactgccgaactttccacagaagcctgctccattcaatacacgcatcaatgctctttgtggctctgcatacatgaggagggcaggggaaaacctgtggacctggcctctcactgttgtcactacagttcacataaggccatcaccaaacacagccgtcacattctccgagagacactgtttgcctcttgctgctctgctgtttctgccctgcctgcatcacccagcacccgcagccttgggggtacaggagcggcgtgagcgtcctgccttatttctgaaccggccacaagtgtctggctcactgagcatcagctggcagccgctgatgtcttttagcaagctaagcatacttgtagtcctggtttcttgggaagttttcatcaggaataggtttgaattttctcaaatgattttctggtgttcatgaaaatgactctggatttgttttcctcctttacctgatagggttgttaagccctccttgcagtcctggggtaaaccccactcggtcacaaggaactgctctccatgcttttcaggtgcaccccaccggctggcacacaccctcacaggtcccaggtcccctcctcccatgttcacatacaggtccacgccctggctcggacctcacgcctcagtacatgtgcctctgaaaagtacacggcactattgtgggctcgtaagaagagatttatttatttctattgtttctgttctctaagtctctgcttggtctctaaacacttcctccagtgtattctgtccttcttttcgacagtgctgaattcatgctcatcatctgtccaggatctctgccttcaattaagaggtgaactcaccgtcagctgtattcactggcctttctcctggatcccataggccagtgggaaggccctaaatttagggtgcatctcatccccagtggtggctctggtgtcaaaaaagccttcttctgtgtcactgaaagtggtagggcctgaattctgccttgtctgagaacaactcctttcttcgacttcaccttggcatacctttggccacaatttttttttaattgagacagggtctccctatgttgcccaggctggtctcgaactccagagctcaagcaatccacccgcctcagcctcccaaagtgctgggattactggcatgagccactgcacccggcctgcccacaattttatttttaaccttccagaatctctttgttccttgcatgctgcagagaattcggttttatgatccaatctggaagtcctttaaaaagtaagcgagcccattttcctctttccagatatgctggccacagtcagaacacattcatgtcttgcttgtttctatgggctttcagcctttcactgtgaggcagaggagctgcttgatttcctgctgttggggactccgtcctgtcctgttggcggccctttatgtgacccgtcagcctgcatgcccacatgtaatgtcccggacattacatgtccctgcttgtgcacactgaaatcagcctggaccccctccctcaaccgcccctagagcccagctctcatcagtagcattatcttcatgctctcctttgctcctgaacacacctcagcttctgctcccacctgactcagcggctctggctcgccggtgttgggggtgaacttaccctcctttctccctgctcctcccactgccccttctggtgggggcaacattctgagtacgcatcactccttctggcacactcacccccggcagctgccactgcccaacttgttgctggagcttcacctgattctgctggaggcctggagctcatctctcagcagctgactcaggaaggacatgttcctttaattctctatgctccaacctgcatctctgtagctgttacacccagagagccacatgcctggatagacacccctggctcgttctgaggagcccaccctgtcccgagcactgggtcctgctgtgaacagcctccacttggccctatttctccccttagaagcaatttaggctttttgttttgtttttttgcctgggtatctacaggattcttggttgcgtccagtaatcctacttacgacgtcgcccaatgtgactcagccccgctgaaccatcctctggcctgcttgaatgcacagtgcctctcctcagcagcccctgcccaaggcgtcactcgcatccttctctttctttcctacattccttctttctctctttcccaggttctttcagctgcactctgctcactccccacatccaccttcgtgccgttcttgtggttcctactctctagtgtgttccttgaggtttaggctttgcttagaaaataattttcttttccttgtttcactcctgagttctacaagttcccaatcctagctctcctttctgcctggctatctctgaatcctcatattcaaaaaatctgtgaatattagagtataacttttatctactttgtgataaaaatttttctaagtggcttttctccatctgtaaggaagttctgctgttttgggtcaggattttgtttttgtttgttttagagacagaatctgttgcccaggctggagcacaattgtacaggaccttggcttactgcgcgccttggcctcctgggctcaagcgatactcccacctcagcctcctgagtagctgggacaacaggcacatgccactgtgcccagctatttttttttttttttttagtagagacaaggccttgctgtgttgcccaggctggtctcaaactccaggctgggctcaagcggttctcctgcctcggcctcccaaagtgctgggattataggcacacgccattgcacctggctggggttttcttacataaccttttcattgttttctgaagaagtcggatttcttggagcgggtactggctgggtcccaggtttgtctcactgctgtcggcttgatggaggtctcctcaccacagaacccaagtctctgtgggccctcagagcctcaggtccctttctctctgccttccagcatgttgccttccttttggaaggtgatcctttcaaagatgtgtcatctcttcttcccaggagctccccatgccttcttttcccactgctccctttcaactctcagcgccgctgggggcaggccccaggtgctggctctgcctgccaggccgcactcccgtgtctctgcaccccctgtgtccgggtgacactgcaggtctccagtactttcctctgcctgttggactttcagtggatgggtctgtttgtcccacagtttcagtgaagatgtactttgtgtacattttttgttctggaagtgagcagctgccatctgctaccagaatcctatgtatagatttgtttggctgtgaatcacattctcttagttttttctttgaacactacctttaggatctttccaactgtcggacgtgcatctaatctagttcttcctctccatgctgtctcctgtgtctcctccaccccaataactacaaacattaaggcctgtgggagcctttccttgttgttactatgtactgaccctaatgtgaatcttagtcttaacttatacatttaaaccacttacatatattgtgattattgacattttgatttttttttaatctgtgctttctaattactattatttctccttcccccatcttcctcccgcaggttctactaaattgacttttcttcattctcctttttaccctttaatggtgtggaagttacaccttccacttctattcatttagcagtttcccatgtagacgtcacatgtatactttaacaaagtctaaggttaataaatctcttccctccaccctcacagaacaagcagctcaccctggcgtcaccacgctcccggtgctccctgtgaccattagtgttcaatgcctcctccttttcatcttccttcctgcctcgcagtcatcatcatccatcataatttgacacaacctgacttatttaagacatatccacatacccacaaacttgtctgttcactgttacttcttggatctcacatttaacttctgacattcaatgttcttcttcctaaaatatctcattatttcattcagctaaattatactgatggtcagctctctccatctttgtctgaagtcacagataagcagagcactagaatgcaaggtctagggttattttccctggtgtgtaattcttttaatatgctgccaatttggtttgcaagtacagatgctccacttgaacctggcccaatttctctcccagatagtatcaaagaactgaaatttcccagataacccatcttgacaataagacaccagactgaccacgtgctgcctgttgaccaactccctttccttatccctccctaattcctgttttcccacacatggttacaatgagatgccagacccctcatccaaccacctgctgcctgttgaccaactcctgtataaccacttgagttggctgggaagatggatttgaggctggtctcgtctgatgtcacccacatgaaagcctttcttctctggcaacactgactgtgtcagagatgggctttccctgcagcgagaaagcagacctaggctgaaacctcagtgtctggcaacactcttacaatggggctatgtcccagtaaacccactgttaagttggaaatatcttttttttttttttttgagacaaagtctcgctctgttgcctgggctggagtgcaacagcatgatctcggctcactgaaacctctgcctcccaggttcaagcgattctcctgcctcagcctactgagtagctgggattatgggcgcccgccaccacgcccagctaatttttgtatttttagtagagacagggtttcaccatattggccaggctggtctcgaactcctgaccttgtgatctgccggcctcggcctcccaaagtgctgggattacaggcatgagccaccgtgcccggcctctcaggagatttttaattactgagtcaatctctctactagttataagtctattcagattttccatttttttcatgatttagtcttggtagtttgtgtttctaggaatttgtctatttcatctcagttatccaatttactggagtacagttgttcacagtactgtcttataatccttttttatttctgtagaagcagtaataatgtcttcacacacccagttctgattttagttatgtgagtcttttctctttttttcctagtccatctagttaaaggtttgtcaattttattgatctttttaaaaaacaaacttttggtttcattgattttctccagttttccaattctctatataatgttataacttgattatattaagtttaacttcaataacataaaaaccctgcccctttacagctctgtccccatccttttcagttgctcatatcacaaaatcacatctttatgtattgagtgccctaaaacacaagccagtaattcatgagtaaaactagtaatacatgagtagcttaaattatatagaaaacaaaatgttagaatttacaaactaaattacaataccagcttttaaactagtaattgttttttaaatgtatgtctctttttttttttttttttgagacagagtcttgctctgtcacccaggctggagtgcactggcacgatcttggctcactgcaagttccgcctcccgggttcacgccattctcctgcctcagcctccctagtagctgggattacaggcgcctgccaccacgcccggctaatttttttgtatttttagtagagatggggtttcaccgtgttaaccaggatgatctcgatctcctgacctggtgatccacccatctcagcctcccaaagcgctggaattacaggcgtgagccaccatgcccagccctatctcttcaatcatgcagacaacaaacaaacaaatggagttataaaccacggttacaacaatacaaacttttatagctgaccatgtatttactttgagatctttcttcttcatacaacttgtagtgactgtatggtatcctttcatttcaacctacaagacttctctccattacctctcttgaccattacttgcaaggcaggtctagtgctaaaaaacttcttcagcttttgtttatctgggaatgtcttaatttcacccttatctttgaaagacagttttactgcatacaagtcttggttaacatttttttttcttcttttagcattggcccactgcctgtaggccttcaaaattcctgatgagaaatttgctgataatctcattgagaatcccttgtgatatgatttagctttgtgtccccacccaaatcgcatcttgaattgtaatcctcaggtgttaagggaggaacctggtgggaagtgactggattatgggagggtttcctccatgccatctcatgacagtgagtgagttctctcaagatctgatggttttataaatggtagtttttcctgggctctcacacacttctctctcctgccgccatgtgcaaaggtacccttcaccttcaccgtgatggtaagtttcttgaggcctcccctgttatgtggaactgtgagtcatcaattaaacctctttcctttataaattacccagtcttgggtagtatctctagagcagtgtaaaaatagactaatacaccttgcatgtaatgagtagctttcctcttgcggttttcaagattctttttctggttttcgaaagtttgatcatctggagtttattgagcttctttagatgtttatatttgtgtgtttcatcaaacctgggaatttttcagccattattttttcaaagttgtctctgcctctttctctcttcaccatctgggactcccacaatagatatattggtctgcttggtggtagcccacataccccttatgatccgttcacttttcttcaatcttcttttctgtttctcaggctcaacaattcctttttttgtttgtttctctttataggttttctatctcttcattgatactgccattttgttcatgcatgattttcttgactttctgcaggttttcctttagttttctcagcatctttaaggcagatgttttagagtctctgtctagtagatctatcatctggcctttcttttagggatagtttctgctgattttgttttccctttaaatggccatattttcctgtctctttgtaggctttttttttttttttttttttttttgctgaacactggacatgttaagtctaataatgtggtaactctagaaattagattcttcctccccttgccctaggtttgctgtttttgttatttttatttattgttcttgttttgattgttgcaggctgtttctgtgcagaggatcaacccaagatggaaatttaaggtctttccagatcttttttgagctgtacctttccctgagcatgcagtcactgtctaattttctaaattttcttattttccccatagttgtttttgaatttcctagtcttttaatgtctggctcccaaaaggggaaaaagagaaaaatgaaagaggggggcaattggtgctggccctttaaatactcttgaagatacttcagctggagggggaggggcttgtaacgactgagggaggtgtgataacaacggcagcgcagcgcacctctttgtctgcacctctgtgatcagaagcagcaatcagggatcctgagcacagatacccactatttggagaaaaggatccttcttgctcaccctgaacccctcaagctgtgtgcgaggtgctccaagaacatgtgcatggctgtctgtggggcatgggtagccgctgctgtgccaagagctgaaaccaaaattaaccccaatttgccatccaagcctcccctggaagttgcaagccttcagtagcttccagagttccaaaatggttacatcagacaggtccttctggtgcaactgtggtctaggtggggacacagcttcctgctctgccattatcccaggatcctctcaatgactctattttaacctccgctgctgtttgttcgtatttgtctgatttaccctccatatctcattcttttcttgtggcgtctaaagctctattcatggctttaaccatttctaatacacttagttcacattctcctttaaatgtagtcttgttacctcaggtcctcgctaaaagcaaagccttccattaggaaggtctgctcacgagggtcaccttctattgcgctttgtaaacgtttaagtagggctccttttcaaatttttgttttgtttagagaccgggttcccattccgtcccccaggctggaatatattgacatgatcatagttcacagcagtcttaaactcctgggctcaagcagtcctcctgcctcagcctcctgagtagctggaatcacaggcacggctaattttttttcttttttgtagagatgagggtctgtgttacccaggctggtctcaaactcctggcttcaagtgaccctcccaactcggccttccaaagtgctgggattacaggcgtgggccactgtgcccagcttgttttttgttttcataggaaatatatgaggtatgaattgcttaaatgtctctcatgtgtcacaggctttatctttgcctcaatcaggtacctcaggtggattaccatgtcaggaaccaacttgtggattaaatgctcaacctggcatttcttttttactaatcaaaagcaaactgcagtatccacttggcatttcttacagcacataagtagtttacatttagactccaaaacataaggcacagacctagggcttcgatgtctaacaaataacctccctgccctcctccccagatacaacagagaagcatatttgctgcctcttggggcaagtttattagtcccttccctagggctaaaaccctcccaggggtctacacagggtactcaactccagttggccaccaagcctttgagcaagacttatcactggtccccacatgagggttaaaacacaagctcctgcctgctctacacgccatggtcctagaggcgctgtgtacaaacccactctcgcccttatggacctgcttcccatcttgcctttttgctccagccctgcaaagctttcctatttacttagcaagctcaggccccttatctgtcatcctatgagggtgttgctgaagagtcactggggcttgttctttctctctcgttgtgtattcttggttttctgttcattttgcacttcagaatccctgttccaatgtcatagggtatgccagagcccacctcctagagaagacctgtgttgacagggccctgagaggaatgtgctgctagcttatcccctgggtggtgcgccctgacagagcatgtaggaggaagcgctacccacctctctagctctagggctatttcaagacaattcttttatttaaaaaaatttcatcagccaggtgtggtggcatgttcctgtagtcccagatactcaggaggccaaggtgagaggattgcttaggcccaggagatcgaggctgcagtgaactatgactgtgctactgcactccaccctgggtgatagagaccctgtctcaaaaaagaaaaataacaacaaaacctaggagtaaaaaaatttcaaacctaagaaaaaaatggaagaatactataacgaacatcagtatacccttcactcattcagtattaacgttttaccacatttgctttttctatttatggatatatgtatacacacacaaattttttcccgatcctttgaaagtaagttacgaatatctgacatctgaccctaaacacatcacaagtcattctcttgcgcagccacaacactttccatacctatgaaatttagcatgaagaacagcctcctgtccaaattaaaatttttcccactgcccccaaaagcatactttatagctcctcatcccagattcaggctctgatcaagaagcacacacctcctctgggtacttctttagtctcttttaacccaggattctttttgtccttcatgacactgacttctttgaaaggtgtaagccccacgacctgtgattgacacagagcccagtgctcccccggagcaggctccactggccactgctgccccactactgcaggggtaggggatatagcttccccaggggccacctgacaaggttcctggaaccattcttatttccatagcagccctttctctctaggtctcatcacatctgtcttccatgaattgttcaacatttttttatcggtgatcattttctatctggttttcaagcactactattaatctactcttttaaaaatagccagactttcctgctagatgatgagcttaagggcaacaaaaggcagaaacatgtattctatctcccttcctttcaaagaccactcaggcactaaggaggccacacttccccagctgaagtcatccagaagccaaaagcctgccgtgtgagggaagggatgacacgcacccccacagggctgtggccattgaaggagccgccctggaagggcccggcaacacctgtcaggattgggcatcaggcccagagctgagcactccagatgtactgtcttttatccatgcccacttttacacaaatcttcctatcctccttttcctcagaacattgatccctctagcacctaggttccaaaatggttagaaatatgggctgcatacaagcaacaaccaagcaaaaacgattctgctacacaacagagaagatgctgagaccttacccaaagagcactgaaaattaaaaaataaaatacaatcactttttaaaaacaaaagaagatgctgagacttcctcatctgtgtcctctctacttccctgccctgtactaaggctgctgggaacgctctgcatgcacacccggacaagcagaacctcagggtgcctgggtgctgagaggtggttagctctagccctccggcgcagctgaaagacacgctgcacctcagaagaaaatgtgcagatgtttgaaaataagcagctaaggagacaaatgctggcgctgccacagggcaaagtccagttctacaggtgaccatcagggctccaggtccagcacactgcagaagctcacagtggagttccgcattaccttgtctatagtgagcatgtagaagtgggtgatgtcgttctcgtgtgcgtgcttgattctcgccatgcactcctcctcgtcgatcagctccccaacgtactcgttaacaaattctccctggaaatcacaagcatgtggccatgacaaaaagcgtgctgaccaatcctcagtgtcggggctcaagactccccatcatgatcacttagaacgggcaccacacacatcagcatacctccgtggagggcgtgtacaaagtctccataaattaaattcaaaggatctcagacatatctgtatgtaaaggttgccaatgaaaaatgtattaagtattcacgaagtggcaatatgccaacccttgcttcctacacgaccttgtctcaggagcgctgtctgataaccaagcttctacataacccactttacacggtgatccccacaacagagaaaatggctacaaagtatctgacaggatgtaaagcaagagtctgggtgaatcagcagtcaggcaggcgaggaacaagggtgctggggaggtgtttctaagcaaccttttgtgctgttgctggaactggcaccaggcttatgaactctctgtgctgggtcagccctggtatggacctgggtcatgccaaaatacatcagggtcagcagttctacatgtctctcagtccctggatgtccttgggacacagtctgggagcagaggcaggaggtcaactgtcctggtgtctaccaacgacttggtcctagactgtgccaggaccacccctcacaagagcaatctccttacgcctgctggtgagtgctcccaagcacctggctactagcccagaggaaagtgggtcacttcacagatcttccatttcataaaaataaccatcagaattctgacataaggcatgttttaagggaatgtgtgagttatagcagatacctttcatgtaacattttaaaatattcaattgtaataattcaattcaaaaaaatatttcaggtcaggcacagaggctcttgcctaaaatcccattgctttgggaggcctaggcaggaggatggtttggggccaggagttcgaaatgagcctgggcaacacagcaagaccccatctccaaaaaaaaataaaattattagggcatggtcaaacacgcctgtagtcccagctgcttgggaagctaaggtgggaggatggcttgagcccaggattctgaggctgcagtgaactacaatcatgccactgccctccagcctagatgacagagtgagaccctgtctcaaaacaaaaacaaaaaaaattttttttccaaaaaataccattctcacatgactacaaaaccaccacaagcaaacctaggcctaattacccagtgaaccgtaatttctcaaaagcaggggaggggataacgacacatacctttctgatgtccctcttggcgaccaggccccaccctttgccatctgtcttgatgatcttggtctctgggtactggcgcttggtgaagcactggttctggcagaactcgcccgcgggacacacctgcgggtggcactcaaacatcagcatcctgttcagacactccgaatcaaagccacaaggattctcatctgtgggcttgcagttgcacttagggatttctgaaatatccgctgtgtagatctggactttcccgtaaggcttattcacctgcagggaaggagtaagctgtcttggtccacacatgagagccttccgaatacccttgcatacccaccactgcctctccttacccagcctccaggtggccttttagaaagcttcagagtcctggctaggacacactactcagaacagccctccccagatcccagaggagctctcctctgccttcttagcacaagaggcaggcagggcaacacaacgccccctcacattattttatcttagtgtctgtgcacatcgctgatgaacaagagctgacacgtatccagccaggccattgtaagatgaagagagaaaaagcgtgttgattgcttagtacactgcagggtgtccagcaaacgctggtaagagctcttctgagcagcttcccgacccatctctctgactcttcctttaccaagcaccagcagcaagccacatgggagtccaccccaggaggagcagtgctaggcaggagggcatagcctctgctctcatgaccttgtggtttactattagtgaaagacaagcaaccaaataacaaagcagtagagacagctgaaaatcagctggggtagaaatgcataatcttagggaagaggtggcgaaagacactcttttcactgctgtggtatgacaaactgtacattttggagaacaatctgggaatattccccaagaatctaaacatttcatactctctgaccctgtgattctgtttctgggaatccatcccaaagaaaatattatataaagatgaatacagagcactttctttacatacaaagatattgactgcagcccacattttacaagcaaaggcagagcacctgacctccggcacacacttatcacaaacactcgtcaggaacggccacgaggctcctggggatgcggcttgccgcaccagctctgagcgcaggcagccctgaggggcctggagctctcacagagccctgccctggctgcacttcctcctgctggggctctcgagctcactggaataaacacagaactggcaagctcccctgccgccccgccatcttgctctctgaggtacaggatctacgtgtttggggctcagtcactgagccctggccgtatgtgactgactcccagcacttggcaacagcctggtgcaggtgggaggctcatccctcagctcctcctgctccaagcagcccggtcaggactgtcaccccaacccttctctaagctaccaagccaagcctcacactccaaggcggatccaagaacccccatgcagatccccccatgccatttgctcatggtctcttgtgtggccatccatgccaggcaccacagatcctggctggtgacagtcctctccccagccatagcctgggtgtgcctaagaacctctcacggccctcggggaagactccctccacacgcgtgcacgcagctcccacacgccaccttgatgtgcttgtatggtgggggcttgcgctcgctctcctgtgtttctcgggcttccctctgaagcttaatttcacgaaaacgagcttcagcttcttgcagtgctaaaaagtcaatgaaataggagtaaagattttagtaaatacaggtaactacctttcaagctccatatttttatagttcactctaaactttcaatgttaagtatagtttctggttcccataaaactagagtctatgaacaactgtcagtgggcaggtatttttaaatgcggccaagtgtgtgaggcaaaggagtgctcagagaacagccatcacctctctacaagacaggcccagggcagagttctgtcgggagctccctgtcctccactatggcctaaggacaaagcaccagggtcaaagcctgggacttgctgttctcagacagaaaataaaaatgcacctgaggccgggtgcagtggctcacgcctgtaatcgaagcactttgggaggccgaggcaggcggatcacctgaggtcaggagttcaagaccagcctggccaacatgctgaaaccccattctctacaaaaaaaaaaaaaaaaattagccaggcatgatggcaggtgcgtatggtcccagctacttgggagactgaggcaggagaattgcttgaacccaggaggtggaggttgcagtgagccgagatcacaccattgcactccagcctgggcaacagagcaagactcagtctcaaaaaaaaaaaaacaaaaacaaaaaaacatgcagctgagctcctctcgaaacaaaaggggttctgagagattaaccataggctcaagcaagaaccgaggaaacacacacccctacaatccgtcccaagaaggaggccagccccatgtcaaccctagacgtgtcctgtggtctgccctgtttttgcagccccaagtcagccacaaaggtttctggctctacaggacacctgcatccacagttaggagactttgccgacagtcgcagcaaacacataagtccacctctcaatttcgtctcgccctcttaataattttttaaaatctttcaatgcctacccattctttatgagatctctgaatgcccaccatgcactcctaccactcagtgcagcctgcaaagcttctggcagcatggagctaaccaagctttaaatacgcgggtccccgcctgcagtcacacaggagccagcactgacccggctgcaacacagcgtgtgcttctccctgaacgagccacatgcacacacctcgggttttctctactggcctcattctctcttgaccgatcataaataccagttcctccagttcctccagtgaagggtcacatccccatcctgcctccctcaaacgtgggtcatcagccagccatgccacatcgttgctcctgcctcccaccccagctggggaatcagaggccaagcaccttgtctgcttgaccacccctgattcctcatgcactgaaaggtaaagcgagcccccaagagcctgctgcacaaggtcgagacaacaggacccttccttcagatctgcattttacataaaggcaagccatggaacatttctgtaaattagtattaaaaataatttctgaataataggtttacagaattttaatgaaattaatcacaaaccaatgttacaaaagttatcagtgtatcttattctatgctcaacaaataaaccagactgcaaacattttcctaatttaaaaaaacagattgaatgcttagtccagtattttctataaagatcaaattttaaaaaatagaaattaggggtaagaaaatgcacgagagtgctgtctcactctctatctgaatatctccgtaccgtttttgaagactcttccgatccctctgaccccctggtagcggctgccccggtccccctccatgtacgggaacactcgcgcctgatgcgtccagtaataatctttagacccaaagaaaaacacagggaattctccaatctcgtgcttcattttctgaatatttgggggaacatttttgggatggcaaacttctgccggccaccatctattataaatattaaaaacaggattcacagactcctcagagacagcgataataatttcaatactttaagtactgtaaagcgaacacatgtgaacagaaaagacataaaagcatacgattctatgtctcacacctgtagttcccaagtttcacccaaatgatatcctggaagtgcagcttcttcccagccctgcagtcattgcagaaccagctgccgtcaggcatctcgatgttcaggcagtcagggtggaaggccgctgggcaggactcacagcacagaaggctcccccctgcaagaggagggcgaggcggccaggcttagcctgtctgctatggctcagcccagattcagtgcttcacagtctacacttattacagccttaacttataaacatcagttttaaaacagcgatctgtacatcagcacgagagcaaatgtcattttcaccacaaataatttcctgtatgtttgcgaaatgattacaattaatttagagctactgtgatatactattaacgtgaagacgcacagaacactgtcaacatcaatgaacacagcgcagacaaggaatgagcctgccttgatatgtggctcctgggagtgtgagaggcgtgtgccgcagacacccccaggcccctcacctttggagcacacgaagcaccagctcacgttgacgtgggcgtggtgtcgcttccccttccgagcagtgaagtgggcagtgcagatgatgctgttggaggcgatcactgagcatcctgctgccagacaagcatccccgctgtgataggcaacggggcagcggacacaccgcatcattttacctgaaggcaaagaaacacaccctaaggaccccaaacactgactccagtcatagtgaaaagagcaactaataattactcagcctccatgaatttgaaaagttaatgctaaaatgaaatggaggtatttgatttaaaaaaagctttcagagcaaaggtgcttcaaaaccatgtttgagaaaatggtcatacatctaaaatgccgcgtgtctcagcctgggcactgcaggcacctggggcacgtgggcagccgacctgggcattgtgcagtgtggagcagcatccctggcctctactcactagatgccaggagcacatccccaaaatatccccagacattgccaaatgtcccctggaggacaaaattgcccgataaagaaccactggtgtcaagaagtacagaaaacctgccaccctcatcccacacacctaacattagaaaatccaaatgtaatttgatttaaagatgttttcttacatataatgggccattaaaaccagagcaaacaggctgggtgtggtggctcatgcctgtaatcccaacactttgggaggctcaggtgggaggattctttgaacccaagagttgaagaccagcttgggcaacacaacagtgagacctcgtctctacaaaaaaataaacaaaattagccaggcgtcgtggtcacagctacttgagaggcttaggtgggaggatcacctgagcctgggaggtcaaggctacagtgagccatgatcacaccactgcattctagcttgagcaacggaaggagaccctgtctcaaaaaaaagaaaagaggtcagagcagtggcctaatagttcaagaccagcctgggcaacatggtgaaacctcatctctacaaaaaaatacaaaaattggcaaggcgtggtggctcatacctgtaatcccagcactttgggaggctgaggcgggtggatcacctgaggtcaggagttcaagaccagcctgaccaacatgatgaaaccccgtctctactaaaaatacaaaaattaggtaggtatggtggcacgtgcctgtaatcccagctactgaagggatgaggcaggaggatcgcttgaacctgggaggcagaggttgcagtgagctgagatcgtgccactgcactccagcctgggcaacagagggagattttttttctccaaaaaaaaaaaaatttacaaaaatcagccaggtgtggtggcatgtgcctgtagttccagctactcaggaggctgaggcaggaggacagcttgagcccgagaggacagcttgagcccaggaggtcaaggatgcagtgagctgtgactgcactgcactccagcctgggtaacagagcaagactctatctctataaagaaaaaaaaaaaagccagggtaaacaaaatctatcaaatggtccaaaggttgcccctctcctatagttaagcatctttagggtgatatttaggatggaaagaaggaaaagggagacaggtcctttgtcaaagaaaacccaacccagccgatgtccagttagtcactcaagataattaatgctctttggtgacaatcccaacagcccaccttcccaagcgcccatgggcctgcgtctggcctgcatctgaacccacagcaaggctgcgcaggtgcacctgtaccttttgacggccttgggtttgaagggttggaagcatggcagctcacacagctgtggagggggcagcggaaacctcggctctcaaatacagtcagagggtattttttcacacaagcctcatggtaaaattttccacactgagttaccacacagcgcttaacatctgtcttgctctctttacacacgaaacatgagtgaatccctaacaaaaagttaaagaaggggtggagagagaggtgcaaagaacaagaattaaattgcagttctgagccactaaaatcaagcaactcctcttcagaggcagccatgctgctaaagcacctggccctgtttccaaccttgctcactagtccaagcattctccagcaaaaagatccagccatcaaggattaccttgctgcgatctgagctccagcttcacctgaaatacaggagaatcttactaggcagcctggctggggaggcccagtctaactggcaagaagcttgaaagaaggggctcctatgaaaagaggcctttcctccttgagagcagctggccagtggtggagcagtcacttatcattctgggcaggcagacagacactcccataagtgaggtgctgctgtggggctgccatggcctgggagactctccaggtgtcttcctgacccaggaagtgttctgacgtgagataggagactccttgggcccggtgagtaggcaggaagggccacggctgtgcaggtgtcctctcatcatcctcacagaccccagactgtgccgggcgacacctgatgcagtaacatggaggcagaacaacagcactgacaacccaggacaagcctggagctgttctttctgttgaaactgaggctcaaggtgacactgtgtcttcataaagaactccatgttcctatggacttcagtgttcggtgaccaaccaggttacctgtacccttaatgctgcactgtctgagcggcagtgccctgtggtggccgcctcacacatagcacaggctcaggccagcccacgggatgaaaagcccatgacctgtcatcccgccaccctgcccgccacctgatggaaaggtaccaagggggcacatacgactgaaatcagagcaaaccctgcagctactgagaggtgggtacacctgccagctgtgggctacaagctccagagagggccaggcggtgggggtggggagggggcttgtcctctgcaggcagctcagggcaggacttggtgcagggggttgcaggagcaggtggccggccaggctgcagagctgcccgcccgtgggaacttgcctgaggcacactcgctgcaggtgaacctcccttctggcctccgggaaagcccaaggcaggcgaggtggaaagctccgcagcagggtccttcacagagcaggaggctgcccggcttctcacacagctgcgggggcagagcaggcgggtaagcagcgcccggcagtcccttctgcacctcttaccacaagggaagccgtctgcttctgtctccagtggcagaaaatcccattttgctactcaaggatatataataacatgcatgggcaaacgtctggcccaaacagaacgtacaaatacagaatcagattaaaaccagatgactgttacagaaagaggccagtcctcagcaatggcaaaggaagtaacaggatcacaaccctgaaggatacatccaagatatttcaaatcagatttgaaaatcaacagaaatcaaaggcaccctaatccagatggcaggtgccacgctgacggcaggcagtattcacacttcccatgcatcgactgcctggcatggaagctcccatgccatctccagctgacagatggggcgggactgaagcacagagtgtaggtggcctggctggggtcctgtgggcacacacaggtctagtgatggccccctcagcccacagcctggcctgtccagtgtgcatgtcatcagtgaagctaaaacaggcctagcacctcaccttttccaacaggaactttgtgtgtgtgtgtgtgtgtgtgtgtgtgtgtgtgtgtgtgtgtgtgtgtgtgtgtgtgtgtgtgtgtgtgtgtgtgtgattacatgatgtgtatacaaatctcatcctacatgtgaattatggatgttaatggagacaactcaatcccaggattccactgagagtcagtctgaccccttcaaaacagagatgagtgagtgacggtgagattggggaaggggtctggtgggaagggaaaagacactacaaattcgctctgcgtaccggggccccagtcagacaccagcacggacatagcggatgctgccttctcctcacctggcacacatactcctttttggcagtcactcctcgctcagactttttggatgagacagatacttcagtttgtgtttcgtctgcactttcgtatggggactccgagggctcgtctcccgggctgtccg

SEQ ID NO: 1691 - DNA, 523 bp, Homo sapiens
catatatccataaatagaaaaagcaaatgtggtaaaacgttaatactgaatgagtgaagggtatactgatgttcgttatagtattcttccatttttttcttaggtttgaaatttttttactcctagttttgttgttatttttcttttttgagacagggtctcttcacccaggtggagtgcagtagcacagtcatagttcactgcagcctcgatctcctgggcctaagcaatcctctcaccttggcctcctgagtatctgggactacaggaacatgccaccacacctggctgatgaaatttttttaaataaaagaattgtcttgaaatagccctagagctagagaggtgggtagcgcttcctcctacatgctctgtcagggcgcaccacccaggggataagctagcagcacattcctctcagggccctgcaacacaggtcttctctaggaggtgggctctggcataccctatgacattggaacagggattctgaagtgcaaaatgaacagaaaaccaagaatac

SEQ ID NO: 1692 - DNA, 8894 bp, Homo sapiens
ctggagctggaggagcagaatcccaacgttcaggatattttgggagaacttagagaaaagggtatgttgtgctgctttaattcatgttgggtggagggaaatggatctttcttgaaaaatttttttctgaaatgaatttgatttttagacctttacgtttttccgtgtgtcctggtccctagaatattaactgtatatgcaccatcctcccccgtaagctgctgcctggcttttgccatctttgaaaacaaactccaaacagcccacaggccccatcctcactgctgcggtgtcagtgggaggctgtgtcacgccactcgccgtctctctctggtcggctccgtgagggtaggggctctgcccattcaggtggtatctgtagatcctaggttctagggcccagagcattccctggcccagagtacatgctcagaaatgcatgttgaaaatatcaacgatttagttgtttaaatgtgaactgaaagtcacttagaaaatattcacaaggctgggctccgtggctcactcctgtaaccccagcactttgggaggctgagatggccagattgcttgagcccaggagttcgagaccagcctgggaaacatagcaagaacccatttgtacaaaaaataaaaattaggtgggcgtgatggcacatgcctgtcctcccaggtacttgggaggctgagtcaggaggatcacttgagcctgggaggccaaggctgcagtgagccatgatcgcgccactgcactccagcctgggtaacagggtgagaatgtatctcttaaaagaaacaactatttgtagatggatttgaagaacatgtcttgatgggatgcttgatgcttgtgcttttctgagtttctctcctgctttggacaattggaactggctcctcagagcccaaacgttgtgccccagctccttcaagggcagcacccagagagacagggttgtgggatggagacatcgaggctgcacactcctgcaggggccctgctggccacccccctgcaagtggcacctctccccacctgtgaggtcacacacaccacacagatgcctctggagcagtggtctggacaggtccaccccaccccacccgttcgtgtctcaggagtgtcccgcgggcaggaaggctgaggccggtgaactctcatgtgcctgcctgtgctttttctccaggtggggcacgtagccagttcaggtgggaggtcgcctgtccctcgtggggcagtttctgggatctgaaccgtgggtgagcacacaggctgaggaaatggatgtgggcagtttggatgagggccagggttccaggagagaccaccagcctggctaccctcggggacgggaagagagaagccacagatcgggggtccttcttacgtgggggtgggatctgttaacatttcatgttctacaagtgtctggagccctccaggaatcactgtatctatgtccgcctgtggttcttggtgtccgcggtgccagaggtttccagtttacagccctctcaaggcatgcccgcctctcaggcattcctgttctgcaaatgctcctgggtgttctgctggagccgtggggagtcagtctcgaggacctcaggggacagccgaagctcccatgacctaaccctaactgaggagggtgtggggctgggcagccgccagctcctctcagccgggaggtctgcggcctgggcgcccctaacttcatgtggttcttaccggcagtgggtgagtgtgaagcgtctgccatgctgccactggagtgccagtacttgaacaaaaacgccctgacgaccctcgcgggacccctcactcccccggtgaagcattttcagttaaagcggaaacccaagagcgccacgctgcgggcggagctgctgcagaagtgtgagtggccgcggccgccatcgggcattgtctttgtagtttccagtcataggtttcttaggttctaaggtaccaagactgccccttcaaggtggcgttctgggccaggcatggtggctcacacctgttgggaggctggggcaggtgggtcgtttgagcccaggagtttgagaccagccaagaaaccccatctctaccaaaagtaccaaaacattagccgggcatggtggtgcgtgcctgtgctcccagctactcggaaggctgaggtaggaggatcacctgagcccacgaggttgaggctgcagtgagctgtgatcacaccactacactccagcctgggagagagtgagaccctgtctcaagaaaaagaagataaagttctgcataaagttttttgttagaagtttatcactatattaaactttatgttctgaaaacatgctttaaaaacttcagaatttaggctgggcatggtggctcacacctgtaaacccagcactttgggaggctgaggccagcagatcacctgaggtcaggagatcgagaccagcctggcccacatggtgaaaccccgtctctactaaaaatacaaaaattagctggctgtggtggtgcatgcctgtaatcccagttgcttgggaggctgaggcaagagaatcacttgaacctgggaggcggaggttgcagtgagccaagattgccccactgcactccagcctgggcaacaagagcgaaacaacatctcaaaaaaaaaaaaaaaacccaccaacttcagaattttaggtgaaggcatctctaatctctgtgaccaaatgaactctgtgccagctgagtcacgctgttgggcacggtgggtgccagggtgaatggctggaggggcacgttccttactctcacgttgctgccttctggagtggcgggtgatctcaattccacttgaaagatatttaatcatttcagttaacgttttcccaaagcacgacaaagatttcaataacatcgttttattttgaatggttatggaattaatatttataatgtacatcaataccccgtttccagagaatccaaataaaaggctgacagcagctgtgcatggatcttggctggaacgggcagcagccagggcccagcgctgtccgggaggctccgtgcagccccgggcccactgggtagcccaggaaggactctgctggccccttgggccccaccccctttggaggccagcagtggccacagggtctgctttgggcactcggtgtcccctgacccttcagccacactgaaccaagtcaggaatatctcttcgtttgtttcttcctcatatttttgtatctagaccgtgcctgctgaccctcagcgaggacggtgctaccactgggccagggggaggcccgggtcgatggagagggctcatgaggtccctcagctcctcctcggctgcctcccccctgccatggggtcctgggaggtgcagccacagccacccagctcccgaaacttgctcacctgagtgagtttctgactcgttgtaaagtgcgagctggtgtcaggcccggctcggaacagctgctcatttagagagaatgcagcgttcacggctcaggccgtcggatgaatccacttgacagagatgtttttacaagggccaagggctctcgctctgaggatccctgacatatgtgacctcttccttccagccacggagaccgcccagcagttgaagcggagcgccggggtgcccttccacgccaagggccgggggctgctgcggaagatggacaccaccagtaaggcccccaccctggtgccgtgagccttgcttttggggcagagctaagggcttcacctggagacccgctccctgttggggaggtggtgcctgtgaatggtcttcaggcagcagtgttgggagcccgtgggaaagcgaaggcactggggcaatttcaccggcttctccccttggggagctcccctgggaggatgtgtgggcacggagacaggagggccgggatctgaggacagtgctgggcacggagacaggaaggccgggatctgaggacaccgctgggcatggagacaggaaggccgggatctgaggacagtgctggcccctgctcctctgctgttggcaccggtggctctcggccttcccagctcgggctttcggccccaagtgctgctcttgggttccgagtgtccctgggcggctccgcggggaggacgtgaccgtgctcagctgcccgtggggctgtgccccccgcacccctccatctgcccttcctgatttgtgctctcagggctgggcgtgagcttaagcaggatgcaccctgatcacaggaagacggcgtgcccctgggaaccatggcagggcatactcaccccagagggtgctggatagtgacctgggggccagagggcaggacgggtgtcgtcctgtgctgagacagctgggtaaacttgcagatgggtggggctgaaagggcagccttacaggcgctctccatgcagctcccagaccagcctggcttagtttatttgggctcccataatcccacagtgttcacatgggacctagtagaaggcatcttgggtctgctgactattgtcgctgtgtggggggccgtccctgggtcatgttcctgcccaccgcagccgaggttccaccttgctctcctctaccccgcctggagcagacccttgtctttccacccccaccaggcatcccagggccagggctgcacctgctggcccagggagggtgggccagccgttgagcagtgtgtccagcctggcccggtgtgctgatggcaccatcccccgggcgtcctctctccgggcctggcaccatgagagccacgcacgccttggagggtgcgtgtgggcgctggtgggtaacagcgtaggtaggcctcaggagtgtcctcaggggacagggggagaaggcttgggagggcggccctcaagcccaggcgcctggcttcatgcccctgccggtggaggcacaggaaggaggcagagctcagcccccgccacactggtgagagactccacctggtgagatcctgtggctgggctggggtgccgctgtctttgtttggtgtcttggcaaagtgtgaggtcgtggctccaggcgttcccctgctccttgaggtccgggatcctgggggtcctgcccgccgcccgccaggggtttggcccttcccctctgcggcgctagcctagaagagggtgggacgttctgggctcagggggtgggggacgtttgccggtcactgctgctggcgccctgactgttgccgtcctccagccccactcaaaggcatcccgaagcaggcgcccttcagaagccccacggcgcccagcgtcttcagccccacagggaaccggacccccatcccgccttccaggacgctgctgcggaaggaacgaggtgtgaaggtaggcccgtcccccagctcctgtggcaccccggggcccgttgcgccctggtgccgtcactaaggcagggctgtgcttgtcttggcagctgctggacatctctgagctggatatggttggcgctggccgagaggcgaagcggagaaggaagactctcggtgggggttggggcctgcgtgtcggcggcaatgggggtccctgcgggccctgcccagttggggtgggttgtgcccacgctcggcgggcagggctgtgccccgtgaggctgctctccgtgggtgggtgcctgcttttctcctcgctccttggtggcctcccctgggaagctgtttgattccctgccgctgccctgagctgacactgcagacgcgcccgggcactggcgaggactcctgttttgtccacagatgcggaggtggtggagaagccggccaaggaggaaacggtggtggagaacgccaccccggactacgcagccggcctggtgtccacgcaggtagggctcggggctgcaccccatgtctggcaccactgcgggtgccccttttgttccgattgtggccactagtgtgctctgtcggagaatatatatatgtatgtacatatgtgtgcagtctgtatttatgtatatatacgtatatgtacatgagaggcagtgtgggccgtgccctgacatgggcatctgactcaggcttggagcgggaacctgccccacgcttgctggaggggctgccaggggagtcctcctcaaccctgtgcctcagtgtcccgtcaggcagggctggtgggacctaagccttgcacgtggccgtgaatgggtgcaggacaggcctgtgggggtgctgggtggtcagaggcctcagtgtcccggagaccaggccctgcctgcgggtgggaggcagccacggggcgcggcaggtgcacagaggctgcagtgggtcgtctgaggccagggcctggaggaggccacactgtggggtcacttcaggataataagctcctttcttcccgccgctgcgtgttctgcgtttcttaacatgagcatcttcctttatatcaatgcttcgtggtaagaaaaagcatcgctccttctgtgctcaagatgggctgtttgggctcctcaacccctcccctctcctacacaggagcggctcagtccccaactctgctggggcgccaggggccaggggtcccgttgtctagcccagggagctcgggagagtggcccccgccttcctgctctagctcggggggccacagcctgtggcagtggagctccgggtcgggccatgtgttagcacatgccggaagcatggcctcttctggaaggaaccttaaactctgtgttccagaaacttgggtccctgaacaatgagcctgcgctgccctccacgagctaccttccctccacgcccagcgtggttcccgcctcctcctacatccccagctccgagacgcccccaggtgagtctgctggccccagcctggaaccagccaagctgcctgccaggacatgaccttgcccacgggcgctgccagggctgcggttctcactcctgcatctctgttgtcccccttctgcctcagccagaatctgctgggggcagatgccccgctgttcagcttgagctccaagacataaaccagctgctttgccccaccctgcccgtcctgggcacagacaggcagcggccccaggggacacggcaggaaggggattgggttcgaaagggttttctgccaggtgacccagctcttgttgctgggtaggcgggaggggagctgagagccatcccctcccagacggagggcactgccaggctcacagcacctcaggccaggtcctgggcccaaggggcttgaggatacagccttcctgtcttcccagcagtgcctacggtatggggacctgctgcaggccagcagctggccagagtccagacatcttatctgcgagtctggaaaggcctgagaccactggccttgttcctctggctggggcttctggggcctgtgccttggctgggggccacagggagttcttgtcagagggtagcaggacagagaaggggagctgagcctgtcacctccaggagcactagggtttgggaacagggtgggggtccagccccctcaccaggccccggtctacttgcagccccatcttcccgggaagccagccgcccaccagaggagcccagcgccccgagccccacgttgccagcgcagttcaagcagcgggcgcccatgtacaacagcggcctgagccctgccacacccacgcctgcggcgcccacctcgcctctgacacccaccacacctccggctgtcgcccctaccactcagacacccccggttgccatggtggccccgcagacccaggcccctgctcagcagcagcctaagaagaacctgtccctcacggtaggtgtacactggtagggcccacaggccaccaggtaggtggtacggccctggccacctcccctagcgtgggggtgccacggtgcctgcagggggatgcaggaggtggtcctggcggggccctggcacccacacccctctccccgctgtagagagagcagatgttcgctgcccaggagatgttcaagacggccaacaaagtcacgcggcccgagaaggccctcatcctgggcttcatggccggctcccgaggtatgttcataaggcagggcctgggggtgcaccgggccgggtgggggggtgcccccagacactcccacccagcagctcctgctctctgcagagaacccgtgccaggagcagggggacgtgatccagatcaagctgagcgagcacacggaggacctgcccaaggcggacggccagggtagcacaaccatgctggtggacacagtgtttgagatgaactatgccacgggccagtggacgcgcttcaagaagtacaagcccatgaccaatgtgtcctagaaccacctgcctcacagctggccgtcacttgtgggggtccacgggacgatggctttgccagcttaaagtaaccggatggcggacacctggcccccgaggtcccccggccgccgccctgctgctgacccagcctgttttaagttctggatgcatttctctggggtatttggggcttatttttaaaattttaatatgggttcttttttgtgtgatttaagacactttttgactcaacgttacatttttgaatgtagtaagtaaattaaccaaaaaagttacaacttcctaattttagtgacagctctgcctgttagactcttactttttaaaatcttttctattttccctcgctggggcagtgccctcctacccccagggttgaggggaccaaggtggcacggtggtactgggggtgcggcagggacacccgaccacaccagagcgtgggagacggtgggccttgtcccctgcctgtgcctgcctgggagttttgtattcatcttttgtatagttgtggacatttaagacagtctttgggtacctattttcattgtaaaactatctgaaccattaaagtcgagcttttctaaagaaagccaccata

SEQ ID NO: 1693 - DNA, 513 bp, Homo sapiens
ctcgagacagagtcttgctctgtcgcccaggctggagtgcagtggtacaatctcagctcactgcaaactccgcctcctgggttcaagtgattctcctgcctcagtctcctgagtagctgggtattacaggcacctgccaacaagtccggctaaattttttgtatttttagtagagatggggtttcaccatgttggccaggctggtcttgaactcctgacctcgtgatccacccgccttggcctcccaaagtgctgggattacaggcatgagccaccgcacccagccagagtgggctttttccaagggcttccgtcgcctctgactggtgactgtgggtggtgacagatgtgagccactcttctcttctcactagatacatctcctgacagcacaaagtctaaagaaaacgcagcctcttaatcttggtttcctcaccttttccaggaagatggactagcgtcatgaacactaatcagagcagtgcacactttaaggctctgtcactgtgaggc

SEQ ID NO: 1694 - DNA, 6855 bp, Homo sapiens
gaagttcgtcccctttgtgaggcccgggatgggaggtgagttgcttgtggtgatgtcgctcgtctcggctcggcctcggcggtggttccccgggtcgttctgtgccgagtcggggctagagtgcgcgtttgttaaaggggcctcgagggcagaccatgagccctgtcccttctcactctggcctgatcctctcctcgggggacgcggttgtgccacgggcggggtggtcgcggggttctgggccagtgccccgagcgcggcagaatttgtccaaactcctgatgccccagcgtcacctcttccaggtgcccggttcccccagggacagcttcaagcggtagggacagacatctgaggacccagcctcagggatgctgtccccgggcttccaggctccagcgccgtaggactgaggcagactccacggtgagaaagagacccgatctaacccaggcctttcatcagagcccaggagggaaggcaggaagtgggaccacgaggcccggggggcttctaactcgtctgtccagggagatctgaattggggtgaagagcagaatctccagaacaaggaggaggtggtgatcatggagacagatttggctgaaatgcctgagaaaggaggtgagaattgcggacgtgttgaacttgtagcgtggaaggacgaaattcctgctcctgaagggaaaacggttggctcaggggaggtggctcttggctggctgtctccattgtcttggggatggatgggctttttaagtgagactgaagggcttggtatgggagcaccgccctttccatggcagctgggcacacagtggacccttcaaagctacccccaaaatgtgagtgaaatgttaacttctatggcaagaattcacctctttggttgtcaaaaatgttttgttttacataggagaaaacaggcgtagtagttaatgactgacttccattctacctgaccagtttcatgaaggttgtgctgtgacctcctacaccagaattccccctggggtggttgttagatttctggattgtaccccaggctcaactaatgcttattactttgaggtggggtccagcaatctacattataaataagctttcagagtgagaaccaacgagtatagattaaactgggaaatttactgacatattctaatttctagatcagaggatgccatcttacagaatgtgttatgattatagcaactgaattcgagcccagagtagcaatattcccgcatatcccgggaagagggtcctgggaggaggtcggttgttttgggggtaccttcagtctcagtgtttgtaggcagcacatatagtatgttgaagtggtttttagactttaaatctgagtggcacgttaagcctaggtctcatcattactgctttcttgtcgttagctctgtcttcccaggattctccccatttccaagagaagagcacagaagagggagaagtggctgctctgcgcctcacggccagatcccaggtgagtgagtgctgattattggaattacaccttgtttcttagagtacagatgcactcccttctttgtgatgtggagtttctttatccactaaagcccatctgcagagctgagttctaaatctaagagactagtcaggagactaatggactcagaagaaaatgttttctacttataacactggatggatttcttccctatttagtgtttattgtccctcaacagataggtaagcagcatttccctttcttagcctcctatgctcatttctgtgcttggtaatgtgagaaactattttaaatataatgtggtacatacctcttaaaacttgtttctctagaggaaacagcatgtatgtgaccttaagtggcaatctaagaaagcacttaaatgctgaagtgattgtaaaaataataaatactcacatagttcaaagaaatactggaaaaggaaagcctatgaaggcgtaatttaaagagttacagttagaatccagccctctgagatgatgaaagctaaggtatgatcatgtctgcaacttacttttatattgttggcccctctctcccaaaaggtaaatatgacaaatattacgaatgtttggctgggcgtggtggctcatgcctgtaattccagcactttgggaggccaaggcaggtagatgactaggtgaggagattgagaccatccttgctaacacggtgaaaccccgtctctactaaaaacacaaaaaattagccaggcatggtggcacgcacctgtagtcccagctagtctggaggctggggcaggagaatcacttgaacctaggaggtggaggttgcagtaatccgagatcgcaccactgcattccagcctgggcaatgagggaaactctgtctcaaaaaaaaaaaaaaagaatttttgaatttaggcggtgattgtactatatcagtgattattgcattcatctttcaacttttgtatgtttgaaacttttattaaaagaagttagggctgggcacggtggctcatgcctgtaatcccagcactttgagaggctgaggcgggcagatcacctgaggtcaggagttcaagaccagcctgaccaacatggtgaaacctcgtctttacttaaaatacaaaaattagctgggcttggtggtgcgcacttgtaatcccagctactccggagactgaggcatgagaatcacttgaacccaggaggcagaggttgcagtgagcccagatagggctactgcactccagcctgggtgagagtgaaactgtctcaaaaaaaaaaaaaaaagaagttgaggaggaaaaaaggagctttccatgatgtgtgtggcataccacaacccagagattcctcaatcagcctttctctttgcttctgtaatccaaggtgtaaaaagtagatactgcacgttcatagtgtttgtaaaagtcacttcctttatgtacttgcctgtctccattggcttctcaactgtcttacattagtcttgaagactttattagtcaagaagctttaagttgcagctgataaagtcaattcaaatgggtctaagtgaaaagaagtaactattgactaacaaactgaaaaatctaggtctggctacatatagggctcaaacaagaatgttaaaacctaattcttcattttactgaccttttctctccatgggttttatggccaaacaagtttttctcctagtgttggcctctaacgagtttaggcttacatcttcctgtgttgaaggccagagaaaaagggcagattctcttctagtcattcttgcagaagtgctgggattgactctaatggggtattaggcccattcctggatgagatattggccaaatttaagtgtaattctttatagaatatacctacacacacacgcacatacacatgcgcgtgcacgcacaaacatcccacccatgaatcagagatggcgtcagtactacctgagctacacagattcaaagtggccaggcatagtagctaggggaaaattagggcactggtaccagaagcgtgaatatatatttcaatactttgatatcagattcaacactgttaacagcatcaaggtgattgaacctattatggaaaatttttaaaactctctttgttctttgtgcattttattagattttaaaaatgcaatattggagctttttttcttgttagaatttgcctgggctattttttacctttgatttgttagatttttaaaaatattaaaagttttagttcttcaatgtaataaagtgaacaacacagacatacagaaatgtaaaggtaatgctacttccccctcaaattcagtccctgcctctctctactatgtatattttttcacattttttgttgtacttgcactactgtattcagacatatggtatactatatttccttccatctacctaccagtacccaacccagcaataatattttgtttggatggcctattctgtatataggatgtggctttttaaaaaaacctttttataagggaaatttgctcattcacatataatacatgtgtttcaaacttttattgccatgtgatttttataattctgtttcctgtgctttattgtttcctcttttgtagttttcctgctgtttgtgcaatggtttgcatttttgttgttctggctttttcttctaatttttgggcacttaatctccactgaatgtggatttagttatgtatatgcagattctaggctaaggttcatttttcctcataatgtcttttctacttaggggctacttagtgatttttacatattattttatcttaagggaataattctcttattattattattattattttttttttgcttttccaactttatttagaaaaacaaatccaggtcccagtgccccctgtaccctccccgaccccagccataatttaaataacttagagacagagttggagggaggggacaggagaggttggggtcacggtggaaggaggaagagagcccactacagccgccgcagcgcccgcttcttgtccgtctttttcttggccgccagcttcttatcgcgctcgccagcatgcttcttggccatgggaccctcagcccctcccaggccccctggggccccagggtcggtggaggaagctgcagtgccactggccagggcccgcccggcttcggccctgccgctgggcccgccggcgcccccgtggatctctgtgagcagacgggcccgagccgcatactcctcggagttctccaagagcaggcggcccgcctcctcgttgagtgcagactcggggttagggtggatcagcaggcacctgatggtcagcagtacgtgtcggatgcccagctcagccgtccagtccctcttgagcacgttgacgcagatctcgccattggcgcccacgttcgggtggaagatcttggtcaggaagtagcccttgggtggggaggcagggaagtccttccccagcaggagtttcatgcggaacagacctccagcatatggggtcccttcagggccctcgatggtgacctggaggtcggtgaggtcctcctcgttgggaaagaccttgatgccatcgggtgggtctgcggtcagtgtcgtcacctccttgtacaccaggcggatgatgtgcgggggcagtttctccacgttggagttcatggctgcggccggccgggggcgggtccccccggcccccttcctgcgttcttcggtccgccggccggggcgggggcccaactgctgccgctgcggccctggagaggccccggcggccccgctccgctccccgctgcctctgacgtccgccgcgcacagcgtacaccaacctgcctccccggtgcccggcagcacttaattctcttatttcttaaatcttagattattttccgcatagtagctttactttgagataattttagacataagaagtgttgcaaatagcacaaagaacttgtatatgcttcacccagattttgcaaaaatttatattttactttgctttattattattttttcaaaatcaggacattcacattggcataatactataacctactgaccttattcagatttttccagctgtcttatttttctctttttaaaatttctgcttttatattgtaaatatttctcttttcctttgttttttgttctaacttgatttttgtgctctggtcatttatttacattttaaaaaaatgaaatggaagtgtttaaagctacgaaatttcctctgagtacagttttagccatgtggcattttttttcctattttatttcattattttcatattttgatatattttctcagttattataaattattccgttctatttttggaatgtattgaaatttactttgttactttttgcaaatgctacatgaatgtttaaacagtaggtgttttccatccagttagagcatttgattcatatttatttcagtaaccttgaaatattattcctgttgtctatgggtttacttaaaggtgcatgttcaatgcagatatgtatctatctccttatggtttttgtattttttgtcttatagaagtataatcttacgatattttatacctaaatatttatgaattgtatctcataaattggagccattttccaatttaatgctctttgccttgaattaattcatgtttaactggattggttttttgctgtcttttctttccgtgacttctccatttacaagttctgtattgcagttcgtcttgtgattggctagattgactcttcaattttttattgaggactcagagaagcattatgtagacgtgactttttttccctctgctgatattttactttaatcaaactacattgttgacttattggttcatattttaatactttattccccagaaaaattgtagtctctcaatggagaaaccagggtcatcttttggttctcatattgaatctagcataatatgcctggtacataattgatagttaccctttacataaaatactccgaatctgacgaccattagaatacttgtcatttatcatagtcagttcccctcttaagtgcatctcaggcttttgctccagggccagcagaaactgggggatgaaagagaagtaattaagggaaagatgttgaaaaaaatattttatgttttaggaaacagtgacattcaaggatgtggccatggactttacaccagaggagtgggggaagctggatcctgcacaaagggatgtgatgctggagaactataggaacctagtctcactttgtaagaatggattgtgattctggaatctgcttataggagcatcattactttaatgaaagtgaaatagcttaacaaagccttcacctttgcattcagg

SEQ ID NO: 1695 - DNA, 21045 bp, Homo sapiens
tttctgacaatacatatacaaacatctttattgacaagtgagccaataagggcacatttagtttacagataaccaaaaacatttgaaatgcataacattaaaatttccaagattcatgttgcagtacaaacatgtggcaggttaaacatcaggcataaaaaggacaaatactgaaacgcaaagggccagagatcccaagtcgcttaacactatttaaaatgttattcaactgcaaacttcagcctctggaaccatcccagatagctactggttaagtgatatgaagtaggaaaaaagaaggttctggaaggtctcaaggaggctgtgcagaaaacagcaccagatggaagcaagagcagaaagaagtcacgtcccatctttatgacaagacacagaacaagatggtcacagttcttcatgggtaaacaaaagatgtggaagacacagccaaccttaagtaacttctactgacggatgctctggcacttctctatgtagagaaggagagagaaagagagcaccaagcaggagtgggggactctatatttattgtctgccagttcttttatatgcattgtcttatttaatccttatgacaacctcatgagaagccaatgatttattccctttgttgaaacctaatacagataaagaaactgagactcagagtagggagtttttccaaggtcacatgactgcttagtggggatggcagaattcaaactcaactttggaaagcccatgttggtcttctttccttagtcaaattttggctctcaaatgaattcctcttcactcaagaatttggcaagtttcaataacttgaattctcctaacaatatatagtaacatcctagaggtaggagtattttgatgcagcatttcccatctcttttatttttctgtccccaattatctctcagtacttttccattccacctagtttctctgactggtttaaaccctttatctgacttgatgaatgctctggaacaggggccaagaaaatattttctgtaaagagccaaacagtaaatattttaggctttcagggacatacaacctactatgggctatatccccatcaaagtcatataatgaaacttaactgacggtattacgaaatggggccttttggaggtgattaggtcgtgagggtggagctctcatgaatgggattagtgcccttataaggggctgaagataccagagctctccccttctaccatgtgaagacacagtgaaaggtgctttctattaaccaagaagcagaccttccctagaccctaaatatgttgacaccttgatcttggacttcccagcctccaaaactgtgagaagtaagtttctgttgcttataagctgctctgtttgtgatattaaagcccagaggcacaacctccgctgcagctactcagttctgacactggacacaaaggcagtcaaggacaacatgtaaatgagtaagtgtggctgagttccaataaaattttcttctgagaaacaggtggtgggccagagttggtccatgagtccaggccacagtttgtcaattcctgctctaaaccattagtactaaatactaagatgataaaagaggtgagttccttttcctgtgttttcttttctttctttttttttttttttttgagtaatgatacagtttagatctgtatccccacccaaatctcatgtttaattgtaatccccaatgtgggaggtggggcctggtgcaaggtgactggaccacgcaggtagtttctcatgaatgatttagcactgtccccctactgctgtctcgtgatagagttctcatgagatttggttgcataaaaagtgtgtagcacctcccctctctcttttcctcttgctctagccctgtgaagatacctgctctggctttgccttttgccatgagtaaaagctccctgagacctccccagtcatacttcctgtacagcccatggaaccatgagccaattaaaccttttttctttataagttacccagtctcaggcatttctttatagcagtgtgagattgaaccgatacagacaacaataacaaaaagtagataaatatgaaggccagagaaatggcaacttcttcacgaagggaagctgcttatcctcaagcaagtcagttgaggactatcctgtgagctattttccgtgccttgttttccactcatacagggaagtatgccctggtgtctcacagttgcttcagttcttctttactgggaccctaaatataataacacactgaaccactcaacttctcagaccttcaatatccctggggctttttctcaaatggacacagcatagctttcagaaagctgaataatgtagacaaaagaagtctccctcaccctttgattatggaaaaccaaagatttattcagtgccaaggataagaaaggaaggacttgatcaacaaccactgttaagattttgacccattcactacttcacgtgaactcccagggaaatggaaaatgaaagaaggtctccgcggtagagggataacaatgacataaatcaatgatgatgccaggcatggtggctcatgcctgtaatcccagcactttgggaggccgaggcaggcagatcacgaggtcaggagatcaagaccatcctggctaacatggtgaaaccccatctctactaaaaatacaaaaaaaattagccaggcgtactggcaggtgcctgtagtcccagctacttgggaggctgagacaagagaatggcatgaacctgggaggtggaggttgcagtgagccgagatcgcgccactgcactccagcccgggcaacagagcaagactctgtctcaaaaaaaaaaaaaaaaaaaaatcaatgatgtacataatccatgtgaacgtaacttagagttgtctgtaaatattatacatcccagttatggtcatcaacatagacagcagcttgttgagggaggaagggaattctaaggactttgaacccagcatttttggtttttaaggctaatataaaagaaattacactctagatgaattataccatatgtgtatctagatctcaaggagtaataaataacaacattgtgtcttcctgatgataaggatgtaagccctcagcctaacctacccaataagaatttccttacaaagtgagaggcttacaacaaagctctgacataaacaagagaggggaaaactggatttcacaatgttcgtactgctacctactctcagggacttcttgaatttccacagatagctatttgggacgttggagattaaaattttgaaatcgctggctagatttcataattatcaaattaacggacataaagaacctgcttatggctcaaaactatgtattacgcaaatgaaattagatgcatacagaattggtcctcacatgcatattatggatgcgccttccacctaaacactcaagtatttaatacagtgataaaaccaacttacatttcttcacattcagtaatttttcagggttgctcttcagtgtgaactctttgatgtctgatgagagatgaactgcacttaaagcttttcccacactcattacatctaaagggtttctctccggtatgagttctctgatgttgaatgagagctgatgaatgaatgaaggcttttccacactcgctacatttgtacggtttctttccaatatgaattctttgatgtttagcaaaattggagctccggctgaaggttttcccacattcattacactcatagggtttctctccagtgtgaattctctgatgttgaacaagatgtgtgctctgactaaaagtttttccacattcactgcattcatatggcttttctccagtatgaactctctgatgcttagttagggatgagcaatggctaaaggctttcccacattcttgacatttataaggtttctctccagtatgagttctttgatgtttaatgagtgctgatgaatgaataaaagctttatcacattcattacattcataaggcttcactccagtatgaatcaactgatgctgcacaagatgtgtacttcgattaaaacctttcccacattcattgcattcataaggtctctctccaacgtgaattctctgatgtgttgcaagggatgagctttctgtgaaggttttcttgcattcactgcattcaaagagaattctagtatgagttctctggtgtttagttaaattagctctgtggctaaaagatttcccacattcattgcaggtatagggtttctctccagtatggactctctggtgtcgaataagcactgaatggtaggtgaagagttcaccacaatcattacatttatgaggttttttctctttataagttctctgctttttcattaagtttgatttttgtttcaagcttttttcaagtgtatggaaggcataagatcctttgggaactctgtcttcagtgataaggacagatttctgattgaagcttttccagtatacatcatgcttatggtctgtttcctcagagagtgaattcatgtgagtgaacatttctctcaaatgtctctcctgatttccttgctgattctctaaccaattttcacattcaagggctgcttccaagttagagtcatagacactattccgtgtcagtctgtctattattgcaactttgcatgattctgctttggaaaaatcttgcactgaagttgaatccttgctctgtggtctagtctccatgtctgaaagacattggaaatgcaaatttccttcgttttctgtgctcaacaaaaaggcagttctgtaataggtaagagttaatgaaagtgaaaagcatgccttcaaggagcaagtggatttgactctttcagatgatttgcaaagagaaacaaatggagggaaacaaatgctcagactatgcagagaaaataagtacatcctatccaggagagtcggaagaggagaaagatgacaaaaaatataagagtagagatgccaatgaagcaatatatccacagatgagcagacaatgagtacacagatcaggatgggaagaaataactttttatagaatacctacttattgtaataaatttctaggcacataaccatcttaatgtacagtacagttatggcttctaaattttcactattccaatcctactcacatccaaatatgtattccattgccagtttaatcttcctaacaatgcttttataacattttgctgatcaaaaacctcctatgatctcccaaaggcataatgacaaatatatgaaatgatatatgcataaggctatttgttgaagcactaattcaggtagcaaaagactgataacatttcacatatcctactatacagaaatgattgaacatatagtggatacaaacaatggagtactatccatctcctgaaaaaataacaaagatctttacatattgctataaggtgaccaccaggatatattaagtttaaaaggaaaaagcaagctataaataagcacacacagtttgctacttttttataaagaaaaaaaaggggtacaaatacctatactgtttgcttacatttaaaaaaaaataaaaaaaggataaatggaaaaccaataaaaatttgtacctatagggaaaacatcagaacatgggagagagggcagagatggaagcttaacctctctaaatatatctaatataaatatagtagaatttttatatccaatataaagctaatttatatagagaaaatattttaagcactgtagttcaaagaaataaacaggagtaaaatagaagagcaaatacagaaataaagtatatgtaagaattaaagataatatgaaggtggtatttcagtcagtgaacaaaacatagatttgtttttccaatgatgccatggcaactgattaactattagaagaaaattaagttagatgagtcactcatttcatacactcaaataaattatattcattcatctatctattcatcttctatccatttttttcaacaaatatttatagaatatcctccatgtgctaggctctgaactagtcactgggaaaaaacagtcactatacatatagaggaagagaaaatttaatctaacattcacgagcaaaatctgaattgcagttttgccacttactagctgtgtgatactggataagttatttaacctctttacttcggtttccttatgtgtaagagagggcaataacagtatccatcttgcaaggaatgatagcaatagctaccttaatgagcattaatgcaaatatctatgaagcatttaaaactctgacacagcataagtgctacattaagtgcttgttaaataaataaaacataaattgacataaggcttgtataggtaggtagaggtaaagatcctcaagtatggtccatgaatccctgggaaactataagttcaaaactgcttccaaaataacatttagatgttatttgcctttttcattgtctcaacattttccatgatgttgtaaaagtaatggtaaaattgcttacaacttcgcacaaatcaacacaatgatactaaacttactagtagtccttgtattcttccccatcatgtactcttggtttaaaaaaaaaaaaaaagccagttttattcaaaaatgtctaaggaagcataaacattaatttcattgaattttaatccttgaagtgcctttttaatattcagggttaatgaaataggaaatattcgtaaagcaattctgtttataccaaagaacaatggtcatcttgaggaaatataccatgcaatcatttgagttgtgagctgaaccagccacttgtttcacagaccaccattttacctgaaaggatgactgaatggcaaactatgttatctaacttgggtatctggcagacagtttctcaaaaatgaacaaagtgaacctgtcatatcaaggacaacaaatgagttttttataaaatttgagctttcaggcagaaattacaagttttggaaaacttctatttaccaccgagagcttgatggcttcctaaaacttaaaggcttttctgataaggtcagttgtgatactaaaagttataatattcaaaaatattgcacaatataaagtgtcaacaaagaagatctgcacttagtgaaccaatattgtccaaaagattgatagatttcaatatatgaaaaatttatggatgtggtttcagattctacattgtacctaatctttcagaaagtatcacttgttcagttttggagctgtttcaaagaagaatagccataattacctgaaaagactataaaatactccttccttttccaacttgtatctgtgtgatgctggattttctccatgcatggcaaccaaaacaacatgtcatatcaagttgcattcagaagcagttgtaagaatatagctaccttctataatgtcatacattaaagagattggcaaaagtgtaaaacaatgccatacttcttaataacattttttggttaaagaaaatagatgttttttaacaaaaaaatatactgtgctaacacgacatgtttataattttttatttctatttttcttttaagagatggggtctcactttattgctcaggctggtctctaactcctgggctcaatcaacccacccaccttggcctcccaaggcactgggattacaagtgtggaccaccacacccggccaattatttttaaatgaattagctaatagcttaaaatttttctgttttaacttgtagtatagtaactattggtagatgtaacctacataaatcaaacatctttagggtctttaacaatttttatagttacagtaggtcctctgatgccaaagcattcagaactgctacactagagcacagagatggaagaagagtagctgtgaaatgaggttgggataatgagtaaaagccagatttcacaagattttgtagacctccaggattttgtctgttaccgtgaaggcagcgagaagccattcaaatgttccaagcagagtgatgacaagatgagatttgattatgaaaatatcagtctcactacaatgttgagaatgaagtatatgagggcaaaggcggaatcacaaagattatcacagtaatccaggaaaacaaaaaatatatgaaggaaaattaacagtgaagaaatacttagaatataattaggtaaatacagtgattaattggataaaggagagagggggtgatgtaaagactgtgcgtagatttccaccacgtacaatttgatgacagtaagtaccattaaaacaattactggaaaaggatgctgttggggagatgggaaatttagacttattttagacattcagttttaaacatgttgtattgaagtatctttgacataagcaaacaaaggaatcaaatagttaagatgttgagaacagccctgaggagagctctaggatggaaataccaatttgggactcatcttgatagaaggtaactggttgtgggaatgatgagactaatgaagtagtaagtagaggctgcaaacagttgatcagttggccaaatcagaccttagacacattttctctgggccacactttttatacaaacttttaaaactagttatacacagttaaaaatagggagattattgctggacgcagtggctcacgcctgtaatcccagcactttgggaggccaaggagggcggatcatgaggtcaggagactgagatcatcccggctaacacggtgaaaccccatctctactaaaaatacaaaaaaattagccgggtgtggtggcgggcacctgtagtcccagctactcaggaggccgaggcaggagaatggcgtgaacccaggaggcagagcttgcagtgagccaagatcgcaccactgcactccagcctgggcaatagagcgagactccatctcaaaaaaaaaaaaaaaagccggggggggggcagattacagataaatgcaaatttagagtttctctcttgaaaaaaactggaagcgtactgaacaacaaccaccatttagagcagggattggcaactacagcctgctgcctactttgctaaataattttttactggaacatacccattcatgtatgcattttctagggctgctttcatactactgtggaagatcgaatggctgcagagacaccatgtcccacaaagggtaattatttattgtctagccatttacataaaaagcttgccagcccttgagctagagccactcctttcagttgaggcctgtactcctctggttcaccagtttccaccttgcttgcttaactcagtgttattacctcctggcccatgtaagtactcaagtttatgactccaggtatacaaaaggaagggagattaaaatcaaattttgagtaattagaatatttaattgttcaaaaaagaaggctaagaagatacactcagagaagtaagaagcaattccaaatggattaagaatctaaagaaaaaattaaagaatatactagtaaacagaggcaaatatatatgtaaccttggattaatgaaacacattttaagcagcactgaaaaggcagaaaaaaaaagattataaaaaattaaacttgagggccgggcgcagtggctcacgcctgtaatcccagcactttgggaggcctaggcgggcggatcatgaggtcaggagatcgagaccaccctggctaacacggtgaaacctcatctctactaaaaataaaaaaaaattagccgggtttggtggcgtatgcctgtaatcccagctactcgggaggctgaggcaggagaattgcttgaacctaggaggtggaggccgcagtgagccaagatcgtgccactgcactccagcctgagagacagagcaagactccgtcaaaaaaaaaaaaaattaaacttgtacatcaaaatgcatagcaaaactgaaagtcaaaaactagaaaaaatatctgtaacataagaaaaggtaaaaacctcatatataaggacctcttaacagatcactatgaaaactgcaataccccaaaaaagggagatgggtggtgagtgggtaagtcacagaaactaataggtctctggggtgaaacagatatatccataatcacggaaagatttttaaactctttcaatattcaaaagtataacttttttaaaaataataatatccaggaaggattttctttatgagctatatataatactaagtatagtaaataaaacagtctggtattagacatagacagacaagtaaaccagagagacaagaaatagaactaagtatgctgaggaactgggtttaccacaggtagcattacaaatcagtaacataagattattccatgaacaatgctggacttattggctttcagcatggaaaaagacaaaattagttttcccatttcatcatatacaaaaataaatacctgtaaaacaaaattgaacattttggaataaaataatctttctgacactgggataaagtagatagacaattcacaaaaagcactatttaaaaaaaaagtttgttattaaaaatgtttaattctatatgcctaacacaccagaaaataaaataagccaaagattagaagaaccaatttcttctcactgacttgcaatgctacttctgtcatagattagtacctaaaatatatgaagaactccaccaaatcaagagaaaagatataaacagcccaatctcaaaaaacaggcaaagggtatcaacaggtaactcacaagaaacttgaatagccaagtaacatgaaatgctcaaacttgtatttatcactcagagaaatgaaaattttaaaacatcattttgcatccgtcagattgacaaaaattaacaagtctgataactcaactgttggcagttcctagtaaagctaaacatgtgatgatttaagacctactaattcttcttccagttatctccctaaaccagctctcaagatgaacataaggaatcaaaaaaaggatgatcactgcaactgctaacagaaaaaaaataaactgttcagtttattcatacagtggacttatgactccacagtagttaaaatgaataacataattcatatatattaacatagattaatatcgaaatacaatgtgaactttaagaaatcagactacataagaaaaagtgtaacaataaaacatacagattgttttacatacatatgtatatatctctgtgtatacacacacatacaaaaacaccgaaatgattcacaccaatttcaagatataatggttacttctaggggagaaagagaataaaagggtttcttttctttgctttttgttttttttttgagacacagtctccctctgtcacccaggctggagtgcaatggcatgatctcggctcactgcaacctctgcctcctgggttcaagcaattctcctgcctcagcctcccaagtagctaggattacaggtgcctgtcaccatgcccggctaatttttttgtatttgtagtagagacggggtttcaccatgttggccaggctggtctcaaatttctgacctcaggtgatccacccaccttggcctcccgaagtgctgggattacaggcgtgagtcaccacacccagctgagaataaaagggctttaactgaatatgtaatatttttatttcttaaaaaataaaagacatcacacacctcaaaaggatggctaaaatgaaaacaagcaatattaagtgttgacaagcatgtggaacaactagaacgcacatactctgctgctaggaatgtaattggtacaatgactctagaaacctctttggcactatctaccaaaagtgagtatgtatctatcctctgataaaacaagtctacttgtatgtatatatccagaagaaatgcatatatttgttcaccaaaaggcatttaaaaagtgtacatagtggcattattcagacagctaaaaactggaaactatccaaatactcatcttcagaagaataaactgggtatattaacaaaacaaaaaattatacaatgataatgaataaattatgatgatatgcagcaacaaagatgtatctcacagctaatgtgcagtgaaggaagccagacacaagagtatatacaatatgattccatttatagaaagttcaagaaccgtcaaaacttggtgctataagttaggataaggtgacccttgggagaagggagggtcctgaaacagggcacaccggtgcttctagaggcgctggtaaggctattttcttgatttgggcaatcgttacatgaatgtgctaaattagtgaaaattcatccaactgtataattattagttttatattgtaagaaaaagaaaggaagaaagaaaagaggcaaacgaagcaaaatattagtacgtgtctaatctcagtgatggatacatgaatgttattttattttctggacttctgtatatattttaaatgctttagaattttaaaaaaatttaaaaataagggcacacaggcactttcttaagcactgaaaagtatttcttcattgtcctgctgggctatcatttatgaagactcccatctatctggctcacctgaatagctgcttttgggggcttttctctcaagcttcaatggttcttttccattctccaagttgtagctctcaggtttggaaactggaagccctattcatttaaaaaaagaaaaagacagaaagaagaaagtaatgggagtaagttatttgtggaagttttcttcaagccagttgaattgttacatattccttagtgaattccaactttctttctttttttttaatttataaaaatttactttttattttttatttttaaagttaatgggatctcactatattgcccaggcaggtctcgaactccggggctcaagctatcctcccacctctgcctccctaagtgctgggattacaggtgtgagccaccacgaccaactttcatggccaccgtcctgctggacttagttatttgtaatgggtataaagatctaaaccggaatatggtctcaacctcttgatctacaaagtattacaggaagagctgaagtaagggagggtggacctctaaatgaagcttaaatatctgcagcaagagtctgggcctggtaaggagttcaattggatttggaaaatacaaatattttcaactgtcagaaaagaaaggaatttctctttatttccttattgtgtgaggaaacttcagagagatgttgcaaattagtccttacctcaggaaaggaggaaaaagcgggacctcaatggcagcaccacataactgtaacggtggtaactgaagttttatcttctaatgtttttcctttccttcttcagttattagaagtcactttcttttttaattttttttttttttttagacagagtcttacaaaaaggctggagtgcagtggcgcaatctcggctcactgcaagctccgcctcccggggtcatgccattctcctgcctcagcctcccgagtagctgggactacaggcgcccgccaccgcacccggctaattttttgtgtttttagtagagatggggtttcaccgtgttagccaggatggtctcgatctcctgacctcgtgatccacccgcctcggcctcccaaagtgctgggattacaggcgtgagccaccgcgcccggcctcagaagtcactttcttaggggatttttttacataaggtttgggaggggctaacagtcccctccacccctcatacaatcatatgcatgcatgtgtgtatgcgtgcatgctagtaagcccaggatctaaaactggccacagagtactcaatctcgctggctctagagattgtttcactgatgggcctgtgaccttatttgctgaaactcccaggaaagaagcattttcttttttagctttgctatctaactggaagaataacgtaaccctgggactgccactggccatctttgccacatggggaaatcctaggaataaagctaatacagagcaaaaccaagctaattgattaaaaataaatcaatgaataaaggaaattcttgataatatatttggatctctgaaaaatcaaaatttttttcccctttaagagtgtgagttaagtttctgtcacttaaacccaaagaatactgatacaaaacaagcacagacatttcatcaagaatctagagcaaaaacagattttctacacaggccaaaaagaattaacactttttgactcctgaatgcaaaggtgaaggctttgttaagctatttcactttcattaaagtaatgatgctcctataagcagattccagaatcacaatccattcttacaaagtgagactaggttcctatagttctccagcatcacatccctttgtgcaggatccagcttcccccactcctctggtgtaaagtccatggccacatccttgaatgtcactgtttcctaaaacataaaatatttttttcaacatctttcccttaattacttctctttcatcccccagtttctgctggccctggagcaaaagcctgagatgcacttaagaggggaactgactatgataaatgacaagtattctaatggtcgtcagattcggagtattttatgtaaagggtaactatcaattatgtaccaggcatattatgctagattcaatatgagaaccaaaagatgaccctggtttctccattgagagactacaatttttctggggaataaagtattaaaatatgaaccaataagtcaacaatgtagtttgattaaagtaaaatatcagcagagggaaaaaaagtcacgtctacataatgcttctctgagtcctcaataaaaaattgaagagtcaatctagccaatcacaagacgaactgcaatacagaacttgtaaatggagaagtcacggaaagaaaagacagcaaaaaaccaatccagttaaacatgaattaattcaaggcaaagagcattaaattggaaaatggctccaatttatgagatacaattcataaatatttaggtataaaatatcgtaagattatacttctataagacaaaaaatacaaaaaccataaggagatagatacatatctgcattgaacatgcacctttaagtaaacccatagacaacaggaataatatttcaaggttactgaaataaatatgaatcaaatgctctaactggatggaaaacacctactgtttaaacattcatgtagcatttgcaaaaagtaacaaagtaaatttcaatacattccaaaaatagaacggaataatttataataactgagaaaatatatcaaaatatgaaaataatgaaataaaataggaaaaaaaatgccacatggctaaaactgtactcagaggaaattttgtagctttaaacacttccatttcatttttttaaaatgtaaataaatgaccagagcacaaaaatcaagttagaacaaaaaacaaaggaaaagagaaatatttacaatataaaagcagaaattttaaaaagagaaaaataagacagctggaaaaatctgaataaggtcagtaggttatagtattatgccaatgtgaatgtcctgattttgaaaaaataataataaagcaaagtaaaatataaatttttgcaaaatctgggtgaagcatatacaagttctttgtgctatttgcaacacttcttatgtctaaaattatctcaaagtaaagctactatgcggaaaataatctaagatttaagaaataagagaattaagtgctgccgggcaccggggaggcaggttggtgtacgctgtgcgcggcggacgtcagaggcagcggggagcggagcggggccgccggggcctctccagggccgcagcggcagcagttgggcccccgccccggccggcggaccgaagaacgcaggaagggggccggggggacccgcccccggccggccgcagccatgaactccaacgtggagaaactgcccccgcacatcatccgcctggtgtacaaggaggtgacgacactgaccgcagacccacccgatggcatcaaggtctttcccaacgaggaggacctcaccgacctccaggtcaccatcgagggccctgaagggaccccatatgctggaggtctgttccgcatgaaactcctgctggggaaggacttccctgcctccccacccaagggctacttcctgaccaagatcttccacccgaacgtgggcgccaatggcgagatctgcgtcaacgtgctcaagagggactggacggctgagctgggcatccgacacgtactgctgaccatcaggtgcctgctgatccaccctaaccccgagtctgcactcaacgaggaggcgggccgcctgctcttggagaactccgaggagtatgcggctcgggcccgtctgctcacagagatccacgggggcgccggcgggcccagcggcagggccgaagccgggcgggccctggccagtggcactgcagcttcctccaccgaccctggggccccagggggcctgggaggggctgagggtcccatggccaagaagcatgctggcgagcgcgataagaagctggcggccaagaaaaagacggacaagaagcgggcgctgcggcggctgtagtgggctctcttcctccttccaccgtgaccccaacctctcctgtcccctccctccaactctgtctctaagttatttaaattatggctggggtcggggagggtacagggggcactgggacctggatttgtttttctaaataaagttggaaaagcaaaaaaaaaaaaataataataataataagagaattattcccttaagataaaataatatgtaaaaatcactaagtagcccctaagtagaaaagacattatgaggaaaaatgaaccttagcctagaatctgcatatacataactaaatccacattcagtggagattaagtgcccaaaaattagaagaaaaagccagaacaacaaaaatgcaaaccattgcacaaacagcaggaaaactacaaaagaggaaacaataaagcacaggaaacagaattataaaaatcacatggcaataaaagtttgaaacacatgtattatatgtgaatgagcaaatttcccttataaaaaggtttttttaaaaagccacatcctatatacagaataggccatccaaacaaaatattattgctgggttgggtactggtaggtagatggaaggaaatatagtataccatatgtctgaatacagtagtgcaagtacaacaaaaaatgtgaaaaaatatacatagtagagagaggcagggactgaatttgagggggaagtagcattacctttacatttctgtatgtctgtgttgttcactttattacattgaagaactaaaacttttaatatttttaaaaatctaacaaatcaaaggtaaaaaatagcccaggcaaattctaacaagaaaaaaagctccaatattgcatttttaaaatctaataaaatgcacaaagaacaaagagagttttaaaaattttccataataggttcaatcaccttgatgctgttaacagtgttgaatctgatatcaaagtattgaaatatatattcacgcttctggtaccagtgccctaattttcccctagctactatgcctggccactttgaatctgtgtagctcaggtagtactgacgccatctctgattcatgggtgggatgtttgtgcgtgcacgcgcatgtgtatgtgcgtgtgtgtgtaggtatattctataaagaattacacttaaatttggccaatatctcatccaggaatgggcctaataccccattagagtcaatcccagcacttctgcaagaatgactagaagagaatctgccctttttctctggccttcaacacaggaagatgtaagcctaaactcgttagaggccaacactaggagaaaaacttgtttggccataaaacccatggagagaaaaggtcagtaaaatgaagaattaggttttaacattcttgtttgagccctatatgtagccagacctagatttttcagtttgttagtcaatagttacttcttttcacttagacccatttgaattgactttatcagctgcaacttaaagcttcttgactaataaagtcttcaagactaatgtaagacagttgagaagccaatggagacaggcaagtacataaaggaagtgacttttacaaacactatgaacgtgcagtatctactttttacaccttggattacagaagcaaagagaaaggctgattgaggaatctctgggttgtggtatgccacacacatcatggaaagctccttttttcctcctcaacttctttttttttttttttttgagacagtttcactctcacccaggctggagtgcagtagccctatctgggctcactgcaacctctgcctcctgggttcaagtgattctcatgcctcagtctccggagtagctgggattacaagtgcgcaccaccaagcccagctaatttttgtattttaagtaaagacgaggtttcaccatgttggtcaggctggtcttgaactcctgacctcaggtgatctgcccgcctcagcctctcaaagtgctgggattacaggcatgagccaccgtgcccagccctaacttcttttaataaaagtttcaaacatacaaaagttgaaagatgaatgcaataatcactgatatagtacaatcaccgcctaaattcaaaaattctttttttttttttttgagacagagtttccctcattgcccaggctggaatgcagtggtgcgatctcggattactgcaacctccacctcctaggttcaagtgattctcctgccccagcctccagactagctgggactacaggtgcgtgccaccatgcctggctaattttttgtgtttttagtagagacggggtttcaccgtgttagcaaggatggtctcaatctcctcacctagtcatctacctgccttggcctcccaaagtgctggaattacaggcatgagccaccacgcccagccaaacattcgtaatatttgtcatatttaccttttgggagagaggggccaacaatataaaagtaagttgcagacatgatcataccttagctttcatcatctcagagggctggattctaactgtaactctttaaattacgccttcataggctttccttttccagtatttctttgaactatgtgagtatttattatttttacaatcacttcagcatttaagtgctttcttagattgccacttaaggtcacatacatgctgtttcctctagagaaacaagttttaagaggtatgtaccacattatatttaaaatagtttctcacattaccaagcacagaaatgagcataggaggctaagaaagggaaatgctgcttacctatctgttgagggacaataaacactaaatagggaagaaatccatccagtgttataagtagaaaacattttcttctgagtccattagtctcctgactagtctcttagatttagaactcagctctgcagatgggctttagtggataaagaaactccacatcacaaagaagggagtgcatctgtactctaagaaacaaggtgtaattccaataatcagcactcactcacctgggatctggccgtgaggcgcagagcagccacttctccctcttctgtgctcttctcttggaaatggggagaatcctgggaagacagagctaacgacaagaaagcagtaatgatgagacctaggcttaacgtgccactcagatttaaagtctaaaaaccacttcaacatactatatgtgctgcctacaaacactgagactgaaggtacccccaaaacaaccgacctcctcccaggaccctcttcccgggatatgcgggaatattgctactctgggctcgaattcagttgctataatcataacacattctgtaagatggcatcctctgatctagaaattagaatatgtcagtaaatttcccagtttaatctatactcgttggttctcactctgaaagcttatttataatgtagattgctggaccccacctcaaagtaataagcattagttgagcctggggtacaatccagaaatctaacaaccaccccagggggaattctggtgtaggaggtcacagcacaaccttcatgaaactggtcaggtagaatggaagtcagtcattaactactacgcctgttttctcctatgtaaaacaaaacatttttgacaaccaaagaggtgaattcttgccatagaagttaacatttcactcacattttgggggtagctttgaagggtccactgtgtgcccagctgccatggaaagggcggtgctcccataccaagcccttcagtctcacttaaaaagcccatccatccccaagacaatggagacagccagccaagagccacctcccctgagccaaccgttttcccttcaggagcaggaatttcgtccttccacgctacaagttcaacacgtccgcaattctcacctcctttctcaggcatttcagccaaatctgtctccatgatcaccacctcctccttgttctggagattctgctcttcaccccaattcagatctccctggccagacgagttagaagccccccgggcctcgtggtcccacttcctgccttccctcctgggctctgatgaaaggcctgggttagatcgggtctctttctcaccgtggagtctgcctcagtcctacggcgctggagcctggaagcccggggacagcatccctgaggctgggtcctcagatgtctgtccctaccgcttgaagctgtccctgggggaaccgggcacctggaagaggtgacgctggggcatcaggagtttggacaaattctgccgcgctcggggcactggcccagaaccccgcgaccaccccgcccgtggcacaaccgcgtcccccgaggagaggatcaggccagagtgagaagggacagggctcatggtctgccctcgaggcccctttaacaaacgcgcactctagccccgactcggcacagaacgacccggggaaccaccgccgaggccgagccgagacgagcgacatcaccacaagcaactcacctcccatcccgggcctcacaaaggggacgaacttc

SEQ ID NO: 1696 - DNA, 254 bp, Homo sapiens
ccgggcgcggtggctcacgcctgtaatcccagcactttgggaggccgaggcgggtggatcacgaggtcaggagatcgagaccatcctggctaacacggtgaaaccccatctctactaaaaacacaaaaaattagccgggtgcggtggcgggcgcctgtagtcccagctactcgggaggctgaggcaggagaatggcatgaccccgggaggcggagcttgcagtgagccgagattgcgccactgcactccagcct

SEQ ID NO: 1697 - DNA, 149 bp, Homo sapiens
tgcctccctcagcctcccaaagtgctgggattacaggcttgaaccaccgcacctggcccattttgcctaattttaactgtgctttttatacgaagttattccctccctttcaccccaattagccctactgagtagtgcctatacctggc

SEQ ID NO: 1698 - DNA, 19472 bp, Homo sapiens
ggcaccttatgttccaacctgcagcacagctgctaggaccttggttcgtttcctgtcttacttagaaatgaaagtagaggaacaacgacttttgaaacaatgaacagggaattaagaagcaagggcagatttcagttttcaatgggttcactgattccctaaacagaagtggagtgactcatcgttttccatgcctcacgcaagaagcgggggagacgagcacaaagggagttaaaggtggtctggtttctgtttgttgtttaagttacctctgcatcatatctgactgcagcagagaatagcgaaaaggcattctccacagtaattcctctcttgataatgtgctgacaaagttttttcagtctgttttcacagtaagatgtcgccaaatccagaagacctaaaagtaaaatatgtgaaaggtttaatcaaatgtataataatttccaatacacagagattttgttttggtgaacagaggtgtacaggtaaattagaagtttcttagtggataagattctgaatttgagtaaataaattctcttttttactgtctgcctcctccacttccacacctctcctatatttactttatacaatttcttcaatagtgcaaagaaagagcaaaaaatgcaatttcaatcctcattttgtttctaaaacgctaaatgcattagcaacttatacttcactactagaaaattaaaataagcccatagcttaatacctaggtgatgggttgacaggtacagcaaaccaccatggcacacgtttacctatgtaacaagcctacacatcctgcacgtgtaccccagaacttaaaaataaattaaaaaaaaaaaagtccttcagtaacattagaacaaaaaagcctatggtcataaactaggtccaaaactattaaccataataactacacaatactacttttaaagatacttacttcaaatcttttttaagcaccaaattaaagccaatacacctgaagctttttacatttcaggactaagaatatgaggggatatattctccaccatgcggctcgtccatcccaatgctaccacagtacctatagcatcttctggcggcaggtcgactgtgtctgtgtagaggtactggagaaaggcacgatacactgggtaagaaaactgatcgatttctatcacttccttcatgtcttcattccaatacgactggaacatggatcgaaaatgctcacacctaaaacagcaaagcaaaagtcttatttgttcagcagcaatttttaaaaaagaaaaaaaaattacctaattaagttgataaaatcagataaacagaagtatccttgggccgggcgtggtggctcatgcctgtaatcccagcactttgggaggccaagcgggtagatcacctgagatcaggagttcgagaccagcctgaccaacatggataaaccccgtctctactaaaaatacaaaattagctgggcatggtggtgcatgcctataatcccagctactcaggaggctgaggcaggagaatcgcttgaacccgggaggtggaggttgtggcgagccgagattgcgcttctgcactctagcctggcaacaagagcaaaactccgtctcaaaaaaaaaaaaaaagtaagtatattaactactatctgggcctgaacacaccaggatcacagacctttagttagcacccaaaaaacattccacatgcaagtggtttttgtacatgccttttacatacactcactttcattttttgtaactcctattaaatactaataggtatacatagagcctggaagtacctagcacttccactactgtttccatttgatggtccccaagatttttttgctcctttgttttttttaaaatgatgtacagaaatgcattttaaacaataaagtgaaagaaattcagaaacaagagttcaaaacttttgactatgtatcaacattaaaatgattcatttgttttttgttttacataataagcatattcttaaaactgttttatatgttaactggattacatcaagctgattattgtctgattatccgacaatttttcttcttttctgacttatcgtcaaaacagccatcactccttttttttttttgcattgcctgttccccttcctctcttcccaggcctgctacaagcttatttataaaacactcacatccactaggatagtcagatatttcaagaaaacctgagcagctcctacactgtatttacatgtacaaagccacctgcacaagaaactgatttctgaatattggattttcttatgtataacacagttgtatctttctaaaaatcatatttttaaattattttaaagtgagatacggcacaaagagaaaaagtattctgaggtgcagtggctcaagcctgtaattccagcactttgggaggccgaggcaggtcagcctcaatcacctgaggtcaggagtttgagaccggcctggccaacatggcgaaactttgtctctacttaaaatacaaaaattagctgggcgtggttagtgcacgattgtaatcccagctacttgggaggctgaagctggaagatcgcttgaacacaggaggtggaggttgcagtgagctggtattacgccactgcactctagcctgggtgacagaatgagtctctgtctcaaaaaaaaaagaaaaagaatccattcagaatactaaaaaaatagtttcacttacataaaaaattacctgagaaataaaaaagaaatagttgtctaagaaagaatcatggatttcatggtcagaaaactgtacatgaaaggaatagactggttgaccacaggtgcacagacagaaacagttccagttcatcttttcaattaatactgtggttcagatatttactcccttaggtaaggaatgacatagggcttttctgttcctttcaaatgtatttctttgccaataggtttttacctaaatttccaaaaagacttgtaaatggccactttaatggtcttagcttatgtgcctttttctgcaatggcaacctttgtggcaaacagttactaataaacgcataggtccctcacatttatacaaggaactatatcttaaaaactttttttttcatttttgagataagatctcactctgtctcccaggatgatcacagctcaccacagccttgatctactgggctcaagcaatccttccacctcagcctccagagcagctggaactacaggaatgcaccaccacacctggctaattttttctattttttgtagagacagtgtctcgctatattgcctaggctggtctcagactcctaggatcaagtgatattcccgccttggcctcccaaagtcctaggattacaggcatgagccaccatgctgagcctagaacattcttcaattggtaattgcatgtcccttagaaacagaagcacagcattcctatgagagttttctgcttaatctataattaaaagagggcatatacacttttcaataacaaccttttgtattttctttaaccacgtaaataaattttctgatggaaatgagtattcaccagattcttaatttaaaaaacaatataagctgggcgtggtagctcacatctgtaatgccagcactttgggaggctgaggcgggcagatcacctgagatcgggagttcgagaccaacctgaccaacatggagaaaccccatctctattataaatacaaaattagccaggcatggtggcgcctgcctgtaatcccagctactcaggaggctgaggcaggagaatcacttaaacccgggaggcagaggttgcggtgagctgagatcgtgccactgcactccagcctgagcaacaagagtgaaactctgtctcaaagaaacaaacaaacaaacaaacaaacaaacacaaaaaaccaatatggacaaatacttaaattcctacattacactttttctaaaacgctccatgagtgtacacaaaaaactctttgacatgaaatggactgatactatctgcaaaaatattaagtagtgacatttctctctactaccaaggctattttttatcagtactcattttgtggaataacaaagaaagaaaagtcaagttattgatgtctctgagctcatgcaaaaatacctgattttcaaaacagctttatggacatgaatatattttccatcaattcgaaacttcagatcagcagtttctggactatcaaattctttcttcagtgactctgcaactgttaaaaagtcttcatgctctgaaggcaacaaacatatattaatatggcaagttcaaggaacagattgaagattcaaaagacttcaaaaagatcatcatgaccgtgatggataattccacttgtttttttttcaagagttcataccttgtttgacaaatcaattctacggtattaaagtaagtatcctgcatctataaactaccaaagaaaaccaccaaaagatggtatttagaaaggctaaataccatcttatatgcctagttatacattagaaatgtatatttttaaagaaaaaaattataggtacttcatgataatataataaccccctctcaaaacgagtggttctcttctaagactaagaatttgtttcccttgactgaaacactaagaatatcttttttctgctttggggtactttcaaggggtcagcatacccaactcaaggaggtgcaagaaacaaacttaccacttaaatggtaatgctaagcggtcatgttctcaagcagagaaactctttcctaagtatctggaatctaaacatctctgttaaccctaaaaatcactatatgcataatccttactcactgtctaaacacagagcaaattcacttagaaacaacacctacatgaagggaacagttttataagaacacaggatcaccttacctgataagaagaattgctgttgtggttatatgttaagtagaactgtgttactacaaggaaaagtaaaggcacttgtacaaattcccggaatgctttcttgtgttttatatgtatgaaagaagaaaagaagcagaaaagggctaatggggaaatttttttaaattccagagatcctgaccaggcatcgaatcaagctgctatggatacacgaagcaggtttcaactgcccacagctgagttaataatcagtgtcttaatcaaagacctcggcttccaagcctgggatgaaccattttcccttggtagcgtgctgttaccagagcaactcctagaggagggacaacagctaaaacctaggctgaaactcaacaaatgagcttatctgcaagctttatcatcagactctcccccaaggcattacctttcacctaagccctgtgaccttaactgacagccctccctccaccccatgcaatgcagagctctcctggctacagaggaaaggtagaaaacctctcaaaagtcaggcttcccctgaccttgcaacctggatcactggtgggtaaaagaatacaaatgactaagatgggccaagagtccaggagtctagattgctacccccacccatccaaaaaaaaacccacttctcatcagtgcttcaacttctgcatccagtcttaggctgaaatgactctttctcctctttgctcctggcaacaagtatagtacatcctttcagagaagaaatcctcctcaaaggggtgaattcaccatgtgactttccgtctaacactcagatgagatcacaaagtgagagggaaaaaacacttttgactttcagtgggtggaagggaaagaagttatctaggacagcagtccccaacctttttggtaccagggaccagttttgtggaagacaatttttccacggaccgaggcggggaggaggatggtttggggatgattcaagcacattatgtttattgtgcacttaatttttattattgttacactgtaatatgtaatgaaataattacacaactcaccataatgtagaatcagtgggagtcctgagcttgttttcctacaactggacggccccatctgggggtgatgggagacagtgacagatcatctaggcattagattctcataaggagctcgcaacctgtatccctcgcatgtgcagttcacaatagggcttacgcttctttgagaatctaataccgctgctgatctgatgggaggtggagctcaggcggtaatgtgagtgatggggagcagctgtaaatacagatgaagcttcgctcactgccactcacctcctgccgtgcaacccagttaataacaggccacggaccagtacaggcatatggcctggggtgtggggacccctgatctaggaggatatagtcaatgaccatattttttccaaacttaacatttaaattgttaggacatttgttctgaaaagaatgcctgtgccattttaagatataagaactgggggaagccttttataacaagtccaggttaagtagtatatacaaatctgaagatgtgtacagaagtgcttcagctgggtatgccatacatgtgcaattctggccaaatagtcccattcagtgaaccaattattttccaatcacaatactcactgcaaaaaaaaaaaaatactgtattatacctaaagaacatggcaaaaataaagtgaaagggagtattcaattggtttcactttaaggcaagcttaactcttcctaagcacccttgcctccatgcccatgactggtcacctaattgggacaactccacctgtctgacacacctaagcatgacgttttagaaaattaaccttcaatatcaattgctgaacaacccaaacaccttaactgccaagaactacattaattttcaagcacagagcatcatgacccacttattccctctgcttataaataaaacaacttaaaagaaatatgctagcaaaaaggcaaacataaacaagaaataaaataaaaagattaaagtcaccttgtaaatggctactcagttttaagacatcctagctttttcagccaataatggactcttaaagaagacaatattcagaaaaggtacagattatgtaaccaaatatcaccccaaattccactaccctttataatacctctgttttgatgcccttctgaaataaaagaatttgaaatcagttgaaagacaaagatagaaagaaagaagatggggttaatgtgtcaccttaaaaaccacaagttgtttgctttttttattgagacagggtctcgctgtgtcacccaggctggagtgcagtggtgcgaccacagttcactgcagccttgacctcccaggctcaagcaattctccacctcagcctcctgagtagctgatactacaggcaggcaccaccactcctggttattttttgtagagatggggtttcgccatgttgcccaggctggtctaaaactcctgagctcaagcaatccacccaccttggcctcccaaagtgctgagattacaggtgtgagccaccacacccagccggttcttcacttttttgaaagttcatttttggaccaggcgcagtggctcacgcctgtaatcccagcactttgggaggctgaggcgggcggatcacgaggtcaggagttcctgaccagcctgatcaacattgtgaaactctgtctctactaaaaatataaaaaaattagccaggcatggtggcacgcgcctgtaatcccagctactcaggaggctaaggcaggagaacttgaacctgggaggcggaggctgcagtgagccgagatcgcgccattgcaccccagcctgggtaacagagtgagactccgtctcaaaaaaaaaaaaaaaaagaaaagaaagttcatctttgattggtattatatcaagttctgtaagaaatctagtataacagaagtgcttaagaacaggctacccaaaaacttatacaagaacagtcatgacagcactacccacgagagtcaaaggtgggaacaacccacatgtccatcaacagttaagtgacaaacaaaatatggtgtatatatatataatggaatattattcagtcataaaagggaatgaaatacagagacatattacgtcaatgggcctcaaaaacattaagtaaaagaagccagacacatgggtcacatattgtatgcttccgcttatatgaactctccagagtcggcaaatccatagaaacaaaaagcaaactagtggttgctaggggttggggggagaggagaatggagtgtgactaattaacgtataagggctttcttctggggtgattaaaacaatttagaatttgacataaagggtggatgtaggccaggcacagtggcaggtggatcacctgaggtcaggagttcgagaacagcctggccaacatggtgaaaccccacctctactaaaaatacaaaaattagctgggtgtggtggctggtgcctgtagtcttactacttgggaggctgaggcaggaaaatctcttgaactcgggaggtggaggttgcagtgagccgagattgcaccactgcactccagcctgggcgacagagtgagattctgtctcaataaaaaaaaaaaaaaaggtggatgtacaacattatgaatgttctaaacgcaactaaactgtaccctttacaatggttaattgcatgttatgcgaatttgatatcaattgaaatgaaagcacttatgagagaaaatttaaagttcatggtaatattttataatatatgaatacatttgattatgcacatctattttgacggaacgtatgaaagctaatagagaataaaacattctgagagatcccaaaaccagcaaagacacaggaaaactggtcagttggtagtaccattcttcctgggtggaggtggccctgcactttcttacccacagacaggaggcgccacgagacggcgggagtggcaaagcaggcaaacacgtcgtcggtgcaggagaagtgggtgaggtgcgggaggatcacggactgaccccggcactggccccacatgtacacgtgcccaccctgcgtcttggctgcagacgtgtgggcagagtgacaggctgcaatctctaccaccctgaaaagttttaagaaaaatgcatgttacttcatgatcacagaagcccacagcacaccacacaaggcaatttaaaagttcatgcttgcaatacctcagaaaacagtccaagttccagggacactagctgccaagtcacagcaacaaaagcaacagatcagggcaagagcactgttctcctttcccaaatgcccacttctcatcctcagctcactgtgagttaggatagatcacacagaccgccgaggaaaacttggaaaacagaccagcaaatccaagcaaatgaggaaagtggacactgagaaaatgccctaacaaatgtgatggcttaaataccatttcttttttttttcttttttgagacaggatctcactccgtcacccaggctagagcgcagtggcatgaccatggctcactgcagcctcgacctcccaggctcaagcaatccttccacctcagcttcccagaccacagctgcaccaccatacccggctaagttttgtattttttatagagacagagtctcgctatattgccagggccggtcaccaactcctgggctcaagtgatcctctgccttcgcctcccaaagtgctggggattacaggtgtaagccatcgtgcctggcccatttctttataaatgtaactttttctctcatctcctaccagagctcagaacactcattgggctgataagcattggctgggggtcacggactctgaacgttccaatccaaaaggaaaacaagccaaacttactatatttctcagtagtatgcttcttgggtaaggtctcataatcagaagtcagcactccaggacataggaggtaagaccttacaattaggctgaacaacatcaagcatctattccagtaacacatattatatcaaatcaatatttaaacagataatgtcctttcaagagcagatttatttaaaagttgttttacttggctcaaagtaaaagtttatattacaccataaacatcaacatggccatagaccttacttgtcttccatactaaaagggcaacagcaagactgcagtaattataccaagatgcattcacacctatcaatcacaggtggttatttcagagagctacataagaatcatatcaacctcatgttcattctggctactactcaaaacacttttgcataggccaggcacggtggggctcatgcctataatcccagcactttgggaggccgaggtgggtagatcacttgaggccaggagttcaagaccagcctggccaacatggcgaaaccctgtctctactaaaaaatacaaaaattagctgggcatggtggtacacacctgtaatcccagctactcaggaggctgaggcagaagaatcacttgaacccacgaagtgaaggttgcagtgagccgagatcgtgccattgcactccagtctgggtgacagagactctgtctcaaaaaagggaagggaagggaagggaaggggggagggagaagggggaagggggaagcagggagggagaaggaggaagggggaagggagaagggaaggttatctcttttgtccaaaatgagaatgttaataaacagaagaatcacaaagccaaacaccacagctctgccacacacagccccaaggccacatcgcacacacagtcccaagacgtggcacagccaagttacctttctttctccaccatgatgtgtgctgggcttagcaggttatttttattgccagttcccagctgcccatatgtgttagctccccaggcatacagcaagccctcatctgttagtgctagagtatgtgcgtaaccgcagacaatctgcaagtaaattgaaacggttaccattagcaggaaaacaggaagggcagggagaacatctacttaaaggctatagccagcttctgcagaatgccaaatcatcatcaggggtggactgacatttgctggaacattaaaaaagcattagaaggccgggcgtggtggctcatgcctgtaatcccagcgctttgggaggccgaggcaggcagatcacaaggtcaggagattgagaccatcctggctaacacggtgaaaccccgtctctactaaaaatacaaaaaattagccaggtgtggtggcggccatctgtagtcccagctactcgggaggatgaggcaggagaatggcgtgaactcgggaggcggagcttgcagagagctgagatcgtgccattgcactccagcctgggtgacagagggagactccgtctcaaaaaaaaaaaaaaaaaagcattagaaaagcctaaaccttaggctactgaatttttccatttttttttttttttttaacttgtcgagcctgttttgccaacaccatagtcttgcttctcctcgtgggaaattagggaagatataatattaaatatggaagatgaaggcacagagtattgccagaaaagactgactgaagagtaaacctccaatatttctccaagttagagcaaggaaggtagatgggaagccactaactgagagtgcaccacacgtacctggttcacacacacgctgtgcaaagctgccactctcacaggggtcagctggttgccattgtttcccaggcccagctgaccgttgccattgtaaccccagccatataccttagagaggacagaagggagagagtgagatttttaaactgctggtaagaaggaagagacaaaaaaaccagcccatctaaacaaatcagatacttccaacacctatattctactctatgctcctgcaactgatctccaaacagaagctattttggagaaggggatgacagaattggcatcagtttctactccatgacttactagttagatagtctggggcaagtcactctttcctgtttaatacatgaggaagttgagcctcactaacaattattaagtacctactgtatgtcagaacactctgaaaggtactagtttttggtcacagtttaacaggcgaaatagatacatgcaaattttttgctgatgggtagcaagtgctacaataggtataatcaaggcgctgcagaacagcaaggaggaaggctttagctctaggaagaaagattaaggaagacttttcaaaaagtggagattggagcagagctgaaggatgaaggagagcaaaaacattccaagcagaaggtattgactgtgttagaagctagtttagaagataagtaggtgggcttggctggacacaactgcggtagtggtagtagaaagactagaagaaggctgggtggggtagctcacgcctgtaatcccagcactttggaaggccagcgtgggcagatcaccaggtcaggagatcgagaccatcctggccaacacagtgaaaccccatctctactaaaaatacaaaaattagctgggcgtggtggcgcgtgcctgtaaccccagctactcaggaggctgagacaggagaatcacttgaacctgggaggcagaggttgcagtgagccaagatcgtgctaccgtactccagcctggcaacaacaacaacaaaaagactagaaggaaaggcaagagctcagagggaaagtgacaaaaaacctaccagggaaagtgcaatacatctataaatttctcattgaaatattaatttaatttgtatttttgaaagataatgctggccacagtatgaaagatgatggagcatataaggctagaggcaggaagaacctttaggaggtcatttcttccctcgttagcaaataggtgagctctgatgaggctctaaactaaggagtgatagggggatcatgagagggaaagcagaggaaagaggattaaaaatagaagacttcccagaacgtgacagtcccttggatatagagtgagaggaggcccatctgctgaaagtaacagagctaggcataggtttgacaggagtgttaaaggttccaaatagccataggaaaaagtactgaccaggaacaaataaaggccttgctcaaattacaaacccaagatttgtggtggcatcgagccccacagcaatgtagggcggcagacatagactggggcttttcagggtaacatgatggagcggaaagggggaatggactttaagggcctggggagagatggttaaaggcactttcacccagtgccagaagtgtaacagacatgaactttctggagagaaatttggcaatggctatcagtatttcaaatggcatacttcttgacccagaaattctttggaaatttattctatagaaatacttgtataagtgtacaaagatacacatacacagagtaacatagaaaatcaccacaactctgtctataacagcaaaaaattagaaaactgacatgttcatcagtagagctctgtatgtgggtcattcacagaagccaaagtcagcagccataatgatggaaagccgcataaatggtctgatcacagacacagataaacacaggatgctatacaggggagcgggaagcaggctgaagaatagcagagaaaagctgcagtaggtataatcatcccatttttttaaaaaaagataattatactcacccatatataattgtttaagggaaaagtccaaaaagatatgcatgaaactattaacaagattgggaaaaggtattcactttttattttatctgtttcacttgtcttcctttactttgttaaaataaccatataataataacctaaaaattaaacttatttttaaaaataagagaagaatactggaatggaggatattcaacggccatcccaaggaattctgaagtcatttcatgatactgagattgattttttaaaaaataagttaacataaggtctatgcataaactctaaagcaccctagcacaggggtccccagtccccagctcatgagccgcaggccggtaccagtccgtgccctgttaggaaccgggccgcacagcaggaggtgagcagcgggcaagggagtattactgcctgagcgccacctcctgtcagatcaatggcagcataagattctcacaggagcacgaaccccattgtgaactgcacaacaaggcatctaggctgtgcgctccatatgagaatctaactcatgcttgatgatctgaggtggaacagtttcatcccaaaaccatgcccccaacaccgccatctgtggaaaaactgtcttccatgaaaccagtccctggtgccaaaaaggttggggaccactgcccaagcacaccaatgcatgatgccaaaacatctgtgtccagggtaatatctttgtataattttcatgcactaaaatatgcataggtagtaaatagcctatttaagtggaagctgcatccagagactaatttcacagaaataaccatcagctcaaaagtgaccacagtagggggtaactaaagggacagttgttaaaagtagctaacaacagtcaggaccccacaaaaaatctgcttttgcaagttgcttcctcctgtgaacattcaagatataggtaggtagttctacaaggacttcatcagttaattttaaaatgtacagttgacattgtttcattggaagagaaaggtaggattaaattctttaatctattacattaaatatcacgaacaaatagctataggcattaggctctttggatcttgcaaaaaatacaacttagacatatagaatctttactttcaggtaaatcctggaatttagaaaagtcatactgaggagcaaaaaacctccagctcctcagtcagtaatcagttaactttcaatggagctaccaaaacaaagcactcttccttcttccatctgatacattcaccttgtgaagaaactgacgtgtaattgaaaaagaaggtagaaagggaaatgggagtggagacacctcacctcgccattgtccagaacagccatggatgaagtctgaccacaggcaatgccaactaccctcttaatatgtaaacagtttgtaacttttcgaggagttggttgatttgctgtagaacctgatcccacttggccacagttgttataaccccaagcaaacacctacaagagaaagaaaaaggaaaaggaaagaatagtcagggtgaaaattctaccccaacacaaataatcataaaaattaaaattatcctacttaatgagtacttaagatgtgctaaacggttctatatgctttacacacattaacctatttaacctgcctagtaatcctgcaaagtgaccctagagtaggtagtacccactttatacatctccgttttatacatggaaactgaaacatgagaggttaagtgacttgcttgaggtaccaaagctggtaagtagcgctaagagaatttaaccccaagcagtctagctatgctcttgaccaccatgctacattccctctataatttgtgtgtgtgtgtatacacacacaactacacatacacacatacgaatgtggcatcaataggaaatgcggtatatgccacataagtattagtgatgtaaaacatttgctcaactctttgggcataaatattcattgttttccatggaaaccattctttttgttttgctttggttttttttttttttttttgagatagagtttcactctgtcccccaggctggagtgcagtggtgcgatctcagctcactgccagccccgcctcccgggttcatgtcattctcctacctcccaagtagctgggacgacaggcgcccgccaccatgcccggctaattttttgtatttttagtagagatggggtttcaccgtgttagccaggatggtctcgatctcctgaccacgtggtccacccatctcggcctcccaaagtgctgggattacaggcgtgagccaccatgcccagcctcatggaaaccattctaaacaagactataaacagagagatgaattagggagggaggtgttggcagtagaggaaataatttcctccaacattaggaaatgtctaagcccccgctccccaccctgcttcacgtggctgcaggaggtggtccacgtatatactgagtgtggcttccatgattcttgtctgatgctggccaaggcaacaacagtagagccctctggtatatgtgttacaggttcatttcacaggtacaaaacaaataacctgcaacacctcctcaaagtatattcacataaatatctagtttaattatgcaaatattaatattcagtataattattcaaagtaccatatgcttaagattaaaataaatcaggaacccagccggcataaattagcaagtttgagctaatttcagcaatcattcttctggcacttctcaaatacatcacattcccttgcagtgctgctgactcttgtttaaaaactggggctatagttccactaaccaagaaatggactaggaaacagtggatctggggcatgaggcctgtgtgctatgcctggctccagcacatcccagtcatgaaatcttggtctccctgagcttttgggtttgttcacttataagttgtcctacttaataaaatctctgtaacatcactgagggacttcaaagagaggaacagtatgatctaatctgtgttagaaaccagagaggacagcaaagcaagactggacagacggatcaacttaaaagatagggaatagaagggactatggcagtagtctaggcaggaaatgacaagacttgaccaaaggcaatggaaatggagaggaacaaaatggaggaacaaaaaggcaaaggaaatggagaggaaatggagatggtacaaaagattagaagacagaatcaataggatgagtgacctttaagataagcacaacttgggggcttaacaagtgttacagtacctactaggaggatagtaaagttattttttccaaactcattacatatactgaaaaataaaatagaccttaaggatggggtcactaaaaaaaaaagtacagaacactgtcacacatctgagctatagtcttagcaaagagcatgggactcagctgccttaaaaaatgaactctaggttgggtgcggtagctcacacctataatcccagcattttgggaggctgagacaggaggatcgcttgagcccaggagttcaagaccagcctgggcaacatagccagattcttgtctctacaaaaaaaaattttttttttaaaagaatgaattctactgccatcaaaagtgtaatcttgattatacaatacacgttatgctagagagagagtgcactcccacaaggtttttagctacatgcacagggctacaatattcacaccacatcaagtacaaatatggtcattaaaatcagaggattttcacaatagccaaaagtggaaaaaatccaaacatccatgaacagatgaatagacaaacaaagtgtggcttacagcaggtccttgaaaaacgtcatttcattcaacatcattttgttataacactaatgagaaaaaatgtcaattcccggccagggccactgtctgtggagtctgcatgtcccatgtctgtgtgggttttctctgggtactctgatttcctcccacaccccaaagctgtgcagactagtttgtgtctaagctgtatacatgtctcaatgattctagtgagagtgagtgtgggggtatacatgagtgcaccctgtatcctgtccagggctgcttcccacctggtgtcctgcgctgccagaagaggctgtggccacatgcaaccctgaactggaacaaacgggttggaaaatgaatgaatgaataaatgaatacaaattattagaaaataaaaattcacaaagtaggcttgtcatggtggctatgcctgtattcccagcactttgggaggccgaggcgggaggatcacctgaggtcaggagttcgagaccagcctggccaacatggtgaaaccccgtctctactaaaaatacaaaaaaattagccaggcatggtggcaggcgcctgtaatcccagctactcaggaggctgaggcaggagaatcacttgtacccaggaggcagaggttgcagtgggccgagattgtaccattgcactccagcctgggcaagaagggtgaaactctgtctccaaaaaaaaaaaaaaaaaaaaaattcacaaagtagacaataaccatacaaatgcataacaataaacaacacagtcaaacaccctcagtgagctgtcacatttgtgatcgtttgcttttgaactgtgtggcagtaggaggtgccccttgtaatttttgctttgcaaacatttattccttgacttaacccaccaccactatgatcaccccaactcagtgattcaccataaattgggtaaataattctcttattgcttttattaatctttgttaaatatatgtattagtttgcatttatttaaatgtttaagaagtggtttgggtcttcagaagtttggtgatgtctttgtgaccagaaatataccataggaacttaactcttgtttttatcaattagccaatggtaaaactggtttcattacatgtctttttgcttaaagttgtagtttccaagaatctatcaatgacattatgtgggcacttactatatgtatccaatggaatattattcagccctgaaaaggaatgaagagaatcctatcatatggtacaaagtggatgaaccttgaggatattatgctaagtgagataaaccagttacaaaaggacaaacattgtatgattccacttacgtgaggtacctagagtaatcaaactcaaagaaacagagtagaaagttgttggctgggcacggtggctcacgcctgtaatcccagcacttttggaggccaaggcgggcagatcacgaggtcaggagatcgagaccatcctggctaacacggtgaaaccctgtctctactaaaaatacaaaaaattaggcgggtgtggtggtgggtgcctgtagtcccagctacttgggaggctgaggcaggaaaatggcgtaaacccgggaggcggagcttgcagtgagcagagatcgtgccactgtactccagcctgggcgacagagcgagactccatctcaaaaaaaaaaaaaaaaagaaagttgttgtcaggggctgggggaggacagaatgggagtgaatgtttaccagggacagcgtttcagttttgcaggatgaaacagttctgtgggtgcatgctggtgacagttgtatgacaaggtgaacatacttaacaccactgaactatacacttaaaactggtgaagctggtaaattttatgttaagtgtatttactatgatgaaaaaaaaaaagaataaagaataaaagcagcatacttacctctccatcagctgccagagccattgaatgatgtgagccacaagctacttccaccacttgcttgatcaagagattggtacagacctggacgggagcaatgccttggttggtcgtcccattcccaagctggctatatccattgtggccccaggcataaacca

SEQ ID NO: 1699 - DNA, 6682 bp, Homo sapiens
ttgctttctacctcttaagctatttaaaacactgagaaggcaatattgcaactttcatttaaatgaaatattcagaattttgattaaaataaataataaattacacaagtttacaagtaacagttaaatatttagggacatgtactaagttttacaaacagtacaaatatttaagagtgttgattgggagtaagggaatgtcaactgccaataaagtggaagatgaaagaataggactttacacagagcatatttagttatgggtctctgtctcctccccacacagaaaaactcccagacattcatgacttcatccaccctgcctggcagataggccatatttcctgaccccctggctcttcacctcaaaaggtttatctttccaccacactagcaaagaccctcaggacacacaactcatactgccagctaagcatctaccccgagggacaaggcaagcacacactagggcagctgggccatcctggccctaatccctccagcggtgtccacactgagcattgcagcacttgtagaaggtggtcatcggctcatctgcagagcgggtctgaagctgcatgaagtaagcacgaggatgttcgcatttgggacacgactctggcaatgagaaaaaagaagtgaccacatttaaaaaaagatgctactcatgactgtcaaaagtaggtattacttaatatgtgggaggccaaggcgggcggatcacctgaggtcaggagttcgagaccatcctggccaacatggtgaaaccccatctctactaaaaatacaaaattagccaggcgtggtggcgggcgcctttaatcccagctacttgggaggctgaggcaggagaatcgcttgaacccaggaggcagagattgcagtgagccaagatcgtgccactgcactccaaaaaaaaaaaaaaaaaaaaaaagtaggtattacttaatatctttagatttgtattttttcggacgatggaatctcgtcacgtcatcccaggctgggagtgcagtggggcgatctcagctcactgcaacctctgcctcccgggttcatgtgattctccttgcctcagcctcccaagtagctgggattacagttgcccgccaccacacccggctaatttttttgtatttttagtagagacaggttttcactatgttggccaggctggtctcgaactcctgacctcatgatccgcccacctcaacctcccaaagtgctgggattacaggcatgagccaccgtgcccagactacttaatatctttaaagatggtaaagaacctccctgctcatttgatcccccttgacaagggtagatctacaaacagtgatgtcattcccaccacgctgtaacactaagggaatctgggagacctgtgactcacacactctccccctcccctccctgagtcccatggttcttctcaaatccagctgaaggctggttggaaacgtaacatggaaggtgactgttttggtccattttgtgctgctgtaacaaaatgcctaagactaagtaatggttagatggtggaagagttttgaagtaaatgctgggaaaagcctgcattgtcaagaattgagcattaagggccgggcgcggtggctcacgcctgtaatcccaggactttgggaggccaaggcaggcggatcacgaggtcaggagatcgagaccatcctggctaacatggtgaaaccccgtctctactaaaaacacaaaaaattagccaggcgtggtgtcgggtgcctgcagtcccagctactcgggaggctgaggcaagagaattgcgtgaacccgggaggcggagcttgcagtgagccgagatcgcgccactgcactccagcttgggcaacagagtgagactccatctcaaaaaaaaaaaagaattgagcattaagggcgattctggtgtgggctgaaaagaagagaagaggccgggtatggtggctcttgcctgtaatcccagaactttgggaggctgaggcaggtggatcacgaggtcgggaggtcaagaccagcctagccaagatggtgaaaccccgtctctaccaaaactacaaaaattagccgggcgtggtggcaggtgcctgtaatcccagctactagggaggctgaggcaggagaatcgcttgaacccgggcagcataggtttgcagtgagcagagatcgtgccactacactccagcctgggcaaaagagactccatctcaaaaaaaaagccaggcacagtggctcaggcctgtaatcccagcactttgggaggctgaggccaacagatcacctgaggtcgggagttcgtgaccagccttatcaacatggagaaaccccatctctactaaaaatacaaaattagctgggcgtggtggcgcatgcctgtaatcccagctactcatgaggccgaggaaggagaatcacttgaacctgggaagtggaggttgcagtgagccgagatcacaccattgcactcttcaaagcgatttcactttgagaaacttatcctacacctgacagaaatggcttcaaacactctatttctgacattaggtaaaaagattttttttttttagacagtctcactcaggctggagtggcatggtctcggctcactgcaacctccgcctcctggttcaagcaattctcctgcctcagcctcctgagtagctaggactacaggcacgcgccactgagcctggctaatttgttttttttttttttttgagacggagttttgctcctgttgcctgggctagagtgcaatagcacgatctcagctcactacaacctccgcctcacaggttcaagcgattctcctgtctcagcctcccaagtagctgggattacaggcaggcaccaccacgctcagctactttttgtatttttagtggagacggggtttcaccatgttggccaggatggtctcgatgtcttgacctcgtgatccgcccacattggcctcccaaaatgctgggattataggtgtgagccaccgtgccagctgctaactttttcacatagcagatttgtatgttcttttttttgacagagtttcgttcttgttgcccaggctggagtgcaatgatgcaatcttggctcactgcaacctccacttcccgggttcaagcgattctcctgtctcagcctcccgagtagctgggattacaggtgctgccaccacgcctggctaattttttgtatttttagcagaaacggggtttcaccgtgttagccaggctggtctcgaactcctgacctcaggtgatccgcccgcctcggcctcccaaagtgctgagattgcaggcgtgagtcaccacacccagcctatatgttcttttatagggggaaaaccacagtactaaccatcagttatctctctcacctctcaatataacttacatttacgtcttcccctttcctctcctggccacatctatgtctaccagacatgcaataaacatgtattttacccaatctgcagtttaatgctcactggtattaacttctaaaaatctatattagaagcgtgtattagtccgttctcacactgctatgaatacctgagactgggtaatttatatagacaaaaggggttttgtttgttttgagacagagtctcactcttgtcaccgaggctagagtgcagtagtgtgatctcggctcactgcaacctctgcctcctgggttcaagcaattctcgtacctcagcctcctgagcagctgggtctacaggcgagcgccaccacacccggctaattattttatctttaatagagacagggtttcaccatgcgggccaggctggtctggaactcctgacctcaagtgatctgcctaccttggcctcccaaactgctgggatttacaggcgtgagccacgacacccagccaagaaaagaggtctaatttactcacagttctgcgtggctggggatgcctcaggaaacctacaatcatggcgaaaggaacctcttcacagagcagcaggagacagaatgagtgcgagcaggggaaacgcaaacgcttataaaacgatctgatcttgtgagaactcactcactatcaggagaacagcatggggggaaaccgctcccatgattcaattacctcccactgggcccctcccaggacacctggggattacggaaactataattcaagatgagattagggtggagacacagccaaaccatatcaaacagaaagaacatacttttttccttagactcttatttttattaatctactcatcattgccattatcaaagctatcacctgttgagtgcctcttatataccaagcacggtataattcactttatgctctcgcagtctacgaatatggattagccccagagaagtcaagagacccaaggaaggtcctacaacaatacaaggttgccctgagaatctgacccgggcctgtatgactccaaggctgggcacaaatattgcttgtctgacagattattaaacagtaacaaatacaaataaattattcaagaaccattttctatttttagaaacctacatcatttatatgacatcatagactctgccaagcagtggcatcaacagcctcataattatccacagtttagcaacagaaacagttttccctcttacctgcagtagagtcaacattctcccaggcagctgctccaccaagcacatcatccacttctttcagttttgggtacttccgatttgttacctaacaaaaacaacacttcagactccaagtaactgaatagcgcaaacctgggctgccaaaccttaaatttcaggattacataagagttcactcggctgggcgtggtggctgacacctgtaatcccagcactttgggaggccaagacgggcggatcacgaggtcaagagatcgagaccatcctggctaacacggtgaaaccctgtctctactaaaaatacaaaaaattagcccggcgtgttggcgggcgcctgtagtcccagctactcaggaggctgaggcaggagaatggcgtgaacctgggaggcggagcttgcagtgagccgagatcgcaccactgcactccagcctgggctacggagcaagactccatctcaaaaaaaaaaaaaaacaaagagttcactcttcccgtagtttcaaactccaaactcccacaacacagtacaaactggagtagcatgcaaacattaagactgacgtagcaccaacatattctaactgctaaaaagtaaaggtattctggccaggcgtggtggctcacgcctataatcccagcactttgggaggccaaggcaagcggatcacctgaggttgggagttcgagaccagcctggccagcgcggtgaaaccccgtctttactaaaaatacaaaaattagccggggatggtggcaggcgcctgtaattccagctactcgggaagccgaggcagaagaattgcttgaacccgggaggcagaggttgcagtgagccgagattacgccattgcactccagcctgggaaacagagcgagactctgtctcaaaaaaaaaaaaaaaaaaaaggacgggcgcggtggctcacgcctgtaatcccagcactttgggaggccgaggcgggcagatcacgaggtcaggagaccgtcctggctaacacacggtgaaaccccatctctactaaaaatacaaaaaaatcagccaggggtggtggcggacgcctgtagtcccagctaattgggaggctgaggcaggagagtggcgtgaacccgggaggcagagcttgcagtgagccgagatcgcgccactgcactccagcctgggcgacagagcgggactccgtctcaaaaaaaaaaaaaaaaaaaaaaaaaaaaaaaaccaataaaaaaaaataaagaaagcacacaatacattacataatatattagaaggtaataagccctatggaaacaattacaaagggaaggagaataaattggaaggaggggctgaaatttaaaatacggtaaagacaagaccaatgagtaaggtggcgatctaggggaagagtgaactgagcaacagcaagtgcaaaggccctgctagcaccatgtgcacgatgagagatcgtccaggaggcggtgttgatgcggcaaagggcaacaggaagggcattaggacttgaaatcggagacgcacgcaggggagggagtcagtgtcggaacctggtaggccctgggagaactccggcttttcgtctgcgtgagctggagaagagccgaaggtttctgcgcacagcacggacctgcgtgcctcagctttaaggaaatcaccgtggccgccgctgtgaacgcagagaagggcgcgagcgtgggagcaggaacccaaggcggtgggaaacggtggggctttctgagtgtattggaaagtagagcccacagatctgctgcagaccagaaaggggcgcgagaaagagcggacagaggcagacgccggggctggcggcgatggagcagcagtcggaggacgcggaaggcctgcgagagtcgcccgcggcccagtgccggccttcgggtcccaccttgcgggtgatgttgtgcacgtaggggcacgtgttgcaggcgaagcggtggcagcgttgtccctcctccacgatcagcccgttcccgcagccggggcagaacagcagcatggtctcgaactccgcaggctccaactcccggcagctcccact

SEQ ID NO: 1700 - DNA, 3814 bp, Homo sapiens
ctagtgcgggctggcagtgcgggcagagcccggctgagaggggcggccctggaggagacggaggccgcgggtgggaccgaggcgcaagaggaagatgaggacgaagaagaggcgctgccgcactccgaggccatggacgtgttccaggagggtctggctatggtggtgcaggacccgctgctctgcgatctgccgatccaggtgtgtgcgggcgggggctgggggcgcgggagtcgttccccgggggtccgggcatccgggcgccggcagcctccgaaggtgctggtgggagactgcggcccaaggctgaggaaggcgcctctgggcgtaaacgagggttttaaccttgaccgggcgcactcgcctggggcgcgaagcttaaagaggaaccaaaaacctcattagtgagtgacatcaaatgacattttaatgtaattgtatttagggggctcgggggacagggtcttgctgcgttgcccgggctggagtgcagcggcgtcctcccacctcagcctcccgagtaattgggaccacaggtgcgcgctaccacacccggctaatttttaaatattttgtacagagggagtctcactatgttgcccaggctgatctgaaactcctgggctcaggcgatcctcctgcctcggcctcccaaaatgctgggatttaggtgtgagccacccgcctggcctgtaatacctttaaaagtcaaagttgaggcaaaaaaagagcctacggtaaaagaaaaatttagttttaaataagagcaagattagtagtactgattgttccatttgcctcaagcgtcaatcatgtgtcaaagcgtcagtatcatgctttgggacgatactgtctttttatttatttatttatttatttgagactgagtcttggtccgttgccaggctggagtgtagtggtgccatctcgactcactgcaacctccccctcccgggttcactacaggcacgcgccaccacgcccggctaattttttgtatttttagtagagacggggcttcaccatgttgggccaggatggtcttgatctcctgacctcatgatccgcccgcctcggcctcccaaagtgctgggattacaggcgtgagccaccgcgcccggccaattttaaatgttttatattttgctcatcatggatattttaattgccttgtatttcttaaatgttgtattaaaatatttattgttattaccgtgttttgctgccccggtaaattttgcacacctgccttactcagtcccgaagcctggcctgggtcctgatgatcagggatatactcagcgtgaactgacaggcctctacccacccctgggggcaggtcctcatgtgagtttattctcttgcctgtttcttagcacctctttcccccagagactctgtccactatggacattaaaatgtgagtggaacatgagattggggctctgatgaattgggaaaccgtaacgtacaggcaaccacccttccttgcccttcgtaaaatggagcaccactttttggccactatcggcttgttctttgttgttgctcaaggtggtaaagagagccagggttcccacttctgcccttggtcttttgtaggttactctggaagaagtcaactcccaaatagccctagaatacggccaggcaatgacggtccgagtgtgcaagatggatggagaagtaatgcgtaagtgctaccctcctcccttcaggttatgtggtccaggctttcacagcaggaagacctaacagtgctggtcagcctgctcagaaactcacaggccatgcccaggggtactggggcaaccacaaacctgccctgtgcacagaggtgttggttcctttcctgccatcggaggctgtggctttgggttctcaccatggatcttctcccatctgtgtccgtggttgcagccgtggttgtagtgcagagtgccacagtcctggacctgaagaaggccatccagagatacgtgcagctcaagcaggagcgtgaagggggcattcagcacatcagctggtaagtggaacaacattcccttcattatagcccttcgtggggctagtgcccttcttggcactgtcaccaggcaccacctggaaacagctctcagctctgcatgagtacagcaccactgaagtgatgagctccctgtcacaagagtgatgagctccctgtcacagacagtgcgggtcgttctgtgcctgggactcctgcctcggccatccccaacattctgctcttccatcggcatcaccccatccgagctgctgggtatcttcacttggggacactgtcgggaatttccagtgtgtctggaagtggcctccctagttttggatggtacacctgtaggggctcccatccccttctcacctgggtgctgtcagccctcactctcctattggatcaactatcctgttcactgagtctcaacactgtcgcctgttgcattagcaaggtttgtttggccaagccgccccagacagccctctgagaacagagcctccttgtagctgcctcagacccaatctgcacattgtacagaacagcccaggtagggaggacagctgccccaggtcccataggactgcatgcctcaagcccacgtcatgcagagccactcagctcaccctgctcagggcacgtggtttacctgcattcccctcttgcaggtcctacgtgtggaggacgtaccatctgacctctgcaggagagaaactcacggaagacagaaagaagctccgagagtaagtgccggccacgtcctgagccgtagggcaccgctgttctgttgccccttagtcccccatgctctgccagagggctgcggctccctctccggagataacaccctcctccaaggagcttccttggggccctccccactaggagaatggcaggcagagggcacctggaggggccttgctgcttcccaccagtggcagcttagggctacacagtgccaggagggaggaaatcagagtgggcatggaggcgaaaggctgtgactctatctgacactcagttccctgccccggggacttgtgagtcggagtgcttctgggtctgtgagaggatggccactgccacttcctggccttcccagaagccacacgcctcccctctgttgtttcttcgtggtcctccacagcctcaggaggggagtcacagatatgtccttctgtagggcaggtgctttatgcctttccttctttttcagctacggcatccggaatcgagacgaggtttccttcatcaaaaagctgaggcaaaagtgagcctccagacaggacaaccctcttcatcactggtggctgagctttttcccagcaggaatgggtcctcgaatcatcgtgcctctttcacagaaaggacgttgtggtggcctcaccccaggcatgcccaacagtaactgtcagcataaacctgggggccctcaggactaggacagggtgagccagtgctccctcctttcatgtacttggcctgagactgacctctccctaggtccaaatgccctagtcacatggcagacccacggcctggcccactgtataaaataaacctgtttgcttcttagtttgaaaagtagaaagccacagtaacctgggtagcaaagactgagattgccccatcacagaggtgagttaaggggagagaattggtacaggcgagtcctatagtccaagatggcgccacaccaccaaagccttgaggccacaccactccccaaaccacacaactgtgttaccatgatctccacagcaaggaggaaataaaagcagagcggctttagggtttgca

SEQ ID NO: 1701 - DNA, 1207 bp, Homo sapiens
caggactgcattttgctccggagcgtccagagtcctggccctgagcgggaatcgcagtggccgaggctgagcggcaggtagaaggggcgtctccggggcttcacagggaacacaggggcttcggcccaaccacaagtacgcagttgcacatgccctacttttgcccattctttgcaaatcccctaaggaacgaacgcgcctcgcgtgcgggcctttctaatcttcgcttgtcccttcacttccacagctggaggtcgaattcaccacgtcacgtagagaaaaggggcggtgtctcgggtctccccgtgtggcatcaaggcgggctccctataggagctggtgtggacgtccgggcgtggggttagggcggatgcggggatcgcggggcgggtgttgacattgtgctctcaccaggcggatcgccccgaccctcactcctggcgtctgagtctctggcgtagcccatgctgagtgggcggctggtcctgggtctggtctccatggctggccgcgtttgtttgtgccagggcagcgcgggatccggggccatcggtccggtggaggccgccattcgcacgaagttggaggaggccctgagccccgaggtgctagagcttcgcaacgagagcggtggccacgcggtcccgcctggcagtgagactcacttccgcgtggctgtggtgagctctcgtttcgagggactgagccccctacaacgacaccggctggtccacgcagcgctggccgaggagctgggaggtccggtccatgcgctggccatccaggcacggacccccgcccagtggagagagaactctcagctggacactagccccccatgcctgggtgggaacaagaaaactctaggaaccccctgaaccccaagagagggaggaccaggatccgaatgggctgggtgagcacgaattaccgaggccttccctttgatacagtccaggatttgtaagggatgaagacccctgggccccattctgttggggtccatacatactctccgaagatagcaacttgcttcaggtcaaagtgaacccgagaaaagagaagaatcactcactactgctcttgccctggactattcaggaagggcagcccggatgttccatgttaaatcgtgacagaattgcaccagacctgatgagttggaaacaatcctatacattaaaagaaattacactatgaggctgtg

SEQ ID NO: 1702 - DNA, 1207 bp, Homo sapiens
cacagcctcatagtgtaatttcttttaatgtataggattgtttccaactcatcaggtctggtgcaattctgtcacgatttaacatggaacatccgggctgcccttcctgaatagtccagggcaagagcagtagtgagtgattcttctcttttctcgggttcactttgacctgaagcaagttgctatcttcggagagtatgtatggaccccaacagaatggggcccaggggtcttcatcccttacaaatcctggactgtatcaaagggaaggcctcggtaattcgtgctcacccagcccattcggatcctggtcctccctctcttggggttcagggggttcctagagttttcttgttcccacccaggcatggggggctagtgtccagctgagagttctctctccactgggcgggggtccgtgcctggatggccagcgcatggaccggacctcccagctcctcggccagcgctgcgtggaccagccggtgtcgttgtagggggctcagtccctcgaaacgagagctcaccacagccacgcggaagtgagtctcactgccaggcgggaccgcgtggccaccgctctcgttgcgaagctctagcacctcggggctcagggcctcctccaacttcgtgcgaatggcggcctccaccggaccgatggccccggatcccgcgctgccctggcacaaacaaacgcggccagccatggagaccagacccaggaccagccgcccactcagcatgggctacgccagagactcagacgccaggagtgagggtcggggcgatccgcctggtgagagcacaatgtcaacacccgccccgcgatccccgcatccgccctaaccccacgcccggacgtccacaccagctcctatagggagcccgccttgatgccacacggggagacccgagacaccgccccttttctctacgtgacgtggtgaattcgacctccagctgtggaagtgaagggacaagcgaagattagaaaggcccgcacgcgaggcgcgttcgttccttaggggatttgcaaagaatgggcaaaagtagggcatgtgcaactgcgtacttgtggttgggccgaagcccctgtgttccctgtgaagccccggagacgccccttctacctgccgctcagcctcggccactgcgattcccgctcagggccaggactctggacgctccggagcaaaatgcagtcctg

SEQ ID NO: 1703 - DNA, 3901 bp, Homo sapiens
attttgatagatagttttattataaaaaattggctttttgattatggaagctaataaatcccaagatccccaagatcttcacggtaagttggcaagctggagacccaggagaactgatgatatagttccagtccaagttcaaaggcctgagaaccaatggtgtagttccagtccaaaggccgagtctaagacccagatggagccagtgtttacttctgagtctgaaggctgagaaaagccaatgtccgggtctcaaagcagtcaggcagaaggaagtctctcttactccggagtgggtcagtcttttgttctagtcaagctttcaactggttggatgggacccacctatattagggagggcaatttactcagtctccaattcaaatgttaatctcattcaaaatactctcacagaagcacccatatttggccaaatatctgagcaccaatcctctagaagttgggacattaaccatcacaggccgtgcgtggtggctcacgcctctaatcccagcactttgggaggctgaggtgggtggatcacctgaggtcaggagtttgagaccagcctggccaacatggtgaaacccccctctccactaaaaatacaaaaattagccaggcgccattgtccacgcctgtaatcccagctactcaggaggcggaggcacaagaatcacttgaacccaggagacagaggttgcagtaagccaagattgcatcactgcactccagcctgggcgacagagtgagactccatctcaaaaaaaaaaaaaaagttaaccatcacaggtagagtttaataggctttatctctgaaacttagtctcaaacagtccagaaaataattatatatttgtagataggtacatacaaataaaacaaacagtgaattgttaatatttgggtaatctaggtatcaggataaaggatatacaggaattatttgaactgttttttttaactttagatgcacaaaccttgtaattatccttgacactttccctcccacaaccaagccattaccacaccctgtaggttttactttcctaatatacatcctgtagccacaatttctctccatttccaccaccaccaccaccaccttggtccaaatcatcatcatctctcacctagactgctacagtaacctcccaacttgtctccctgtttccactcttgcctcctctacaatccattctccaccctgaagccagtgatctttgcagaatacaaacttaaagtcagctaaatgcaatgcatgatccttgattggtttctgaaaattaaacatttataatgtttacttagactgtgctgctattacaaaataccactgactgggtaatttataaacagaaatgtattttctcacagttctggaggctgggaagtccaagattacggcactggcaggtttggtatctagtgaaggccagttcctcatagatacgccatcgaggtgaccttacatggcagaagggacagaaggggccaacttaccccctcaagctctttcaaaaggcgttagtccattcttgagggtggagccctcatagccttattacctcctaaaggccccaccacttaataccaacaccatggattaattttcaacatgaattctggaggagacatattcaaactatagtagacaccaatgagacagttggggaaatctgaatatcaactgtatgtgattatagtattgtatgaatgttaaatgtcttggatgtggtaatggtattgtggatatgtatgaaaatgtccttgttcttaggagatacacattgaaagtacatagcaattaagtgtaaagaattttgtggggccaggcgcagtggctcacgcctataatcccagcattttgggaggccgaggcggactgatgacctgagtcaagaccagcctgaccaacatggagaaaccccgtctccactaaaaacacaaaattagccagagtggtggcgcacgcctgtaatcccagctacatgggaggctgaggcaagcaaatcgcttgaacccaggaggcggaggttgctgtgagccaagatcgcaccattgcactccagcctaggcaacaagagcgaaactccatctcaaaaaaaaaaaaaagaattttgtggctgggtgcagtggctcacgcctgtaatcccatcactttgggaggctgaggcaggcagatcacttgaggtcaggagttccagagcaggaggatcacttgaggtcaggagttccagaccagcctggccaacatggtgaaaccccatctctactagaaatgcaaaaaaatttagccaggtatggtggcaccagcctgtagtcccagctactcaggaggctgaggcaggagaatcacttgaacccagaaggtggaggttgcagtgggccaagatggcgccactgcactccagtctgggcaacagagtgagactctgtttaaaaaaaaaaaaaaaaagaattttgggccaggcgcagtggctcacgcctgtaatccctgtaatcctgggtggccgaggagggtggatcacctgaggttgggagttccagaccagcctgatcaacatggagaaaccccgtctctactaaaaatacaaaattagccgggcatgttggcacatgcctgtaatcccagctaatcaggaggctgaggcaggagacttgcttgaacccaggaggcagaggttgcagtgagccaagatcacgccattgcactccagcctgggcaagaagagcaaaactccatctcaaaaaaaaataaataaataagatttctgcacctaactcaagtgattcagcagaaataattattattatttcattattattatacacacatacattaaaagagatacaaagccaagtctggcaaaatcttatcagtgaacctaggtgaagagtggataaatgggttgctcattgtattaatcttgcaaattttctggaagttttaattttttttaaaggctagggaaaacagtgtatgtcatagtttaaatttcttgagtgtgataaggttattgtggttatgtatgagaatatctttgttcttaggagatacatattggagtagttaggggtgaaatgtcatgctatctgcaacttactttcaaatggttcatccaaaaaagcatataaatatattttaaagtatatgtaaagtacttaaatatatgagtatatatgtacaagtataaaataaatataaatgcaaaaaatggtgggtcaagtgaaaggtagagggtgttgctttgaactattcaacttttctgtggctttgacatttttcaaaatgagaagttggggaaaaacatttagaaatatgtaaatatattaaggatacaaaataaaatttaaataattttacaagttaagaatcatcctggaaaaattacatcctgttacatccctgcttaaaacctcagtagcttcccactacttctaggataaagacaaaattgcctaacaagggctacaaggcctggggtggtctggcccgttcctctcctcctggtaccctactcatcaccatcagctgccccctaggctccaaccacacataaccacaccctaactacaccagaaggaaagactccctcaaaattctctctcctcctgtcctttacacatgcagctaccaaagccaaaacctcactatgagggactgagaaatggattctcatgttgtttctgctgaactgtttccctaaatctcggaaatattctctgcccgcctcccattccacctctccaaccccggccaagtctgggtaacttgcctccttagcatcctgtgtttatctcatcgtagcacctagtacccagtattgcaattgtccgctcacttgttagtcttcagtgctctgttgtctccttgaaaacagggcctgacttgactccc

SEQ ID NO: 1704 - DNA, 15857 bp, Homo sapiens
cttccctggtgccgggagcagtcgccgctgccgcctccgcccgcggccgggacccccgtcctcgcccgggactccttacccggggaacctagaccaggtgagacccctttctcagtcgctcacctcctccccgcccctggcagaagcatctttgccttgccttgcagccattttatcctccgatgctttgcttatggggagggtgacgatcccctctctaggggtgaggggggttggtgggttggtggtggtttggggatggacatttatttcagttgtgctcttcaggacacacacacacacacgcatatgtataatattggtgaatggggaggaggggtgtttttctctaccttaaccaagtccccactatccccttcggagattaacgtggtggtggggttgtgaggtgggatgaggttccctcaaactcctatcccctcctcaccttgacgtccccccacccccaggatgaatgataaatgaccttggctggggctggagaatggatgctgcctcagtgtgcacgcctggacttgggtgggtggggggcaggggaagaagggcaggtgaaggatggagggaaggggagtgaagaatggaaatactggggagacagagatgtagagccgccaggtgttgggggcatggatggcgggggctggcggcagttgctccggggtggggggaagggatgttgagtgaaggtggacacttgtctagcagcaggaccaagggtggaggaggtgctcagagcagggatttagtcagttctgggggcttttcccttattccggagctgaggcaagatggggtgtgggggggtcgctgcaaatgctgataggggcggtctctatgtctgtgcatgcggaggtctctccctgcgtccccctctctgcctctccgtattcctcagtgtgcattctcagctgacaccctcatttttatccctcagaactgtgggtgctcctatcttcctaaccttggtaggatgtggggaggggaggcgcagtcttgatggtcctgggtgggggctgaagttcgatgaccgggctgtcatggggaaggggtgctcccgcacctcccacattctacccccgcccccgcggacgttttgataagtgattgctttttaatgaccttgtcacctgagctaggaaggcctggggatctgggtggaccccaaagtcaggggctttgactgggagggtggggggttctggacccagggctggatgagctgttctgaaagaaagcatttgctctggagtcccctgcctgtctccaccctctgcagaaaatctcctgggcacattttttcctgtcaggtgaagtcagccagcctaggaccttgtaaccctgaaccttgtctcctttaacctccacctctccaagtcttgtctcactcccccaggcttagccaccctgtgctgttttgggggctaaaaatagcaccacttcctcaccagctcaaagaatttgtcttctttctttctctcctgacctcctgggcttgctggccctgaggaagctggctgttgagacctcatatcctgctgtggttgtggaaggctttcctgccctacgtgcccctctcagggggaaatagggtcaacaaacatagagtatggctcctggtgggtcctgcctccttcagggctggaggggagatcctggttaggaaagagaggaaagctagcaaattgccatgcgctgaggggattccgcagttccagctctttcatgggggatggttgggccctgaaccatgaagaaaaggtgacataggggtcactgcttctggtcaccgtggtccactgcttacatctgtcctgaggggataaggcgctgcttgccagtgcttctctctgaaccacatagcattgcttaccgtcttctaccagggcgtgtgtgtgtgtgtgcgtgtgtgtgtgtgtgtgtgtgttttaatgaaggccctggatgggtgggagcaccggaggcaggatatttttagggggatgatttctgatcagaatctaggcctgcttcctctgctcctatgaaggaagggggctatcccatgccttcctctggagaatgtcttttttggggggacacccaaaccccctttattctacatccgcctcctacgcaatgcggtgtttgtggactccttcttccttgactcctggaggaggagcagaaaggattaagggggattaggaagggaggccctggagggatgggatgcaactgtaggccttagaacctcatgttggaaatgtatgcatttgacagtcatttccattctcacccccatctgtggaaagggggcctatctatgacattctgaagcaaggtggcagtggacagtcatcacctctttcttagctttccatctttcctccactttacttgggttccaggtcccccttttctggatcttcccttgttcttctggaggtagttaatgtgggcccagctactggaattagttgaaacatagataggggtgtcttgggactctgtttgcaaggatgctgggcaacagcatctaagtatgacccccctgttgtcccttgctgcttcctgtttctttcccactttcaacatcataggaaggaagaaaactaacatagagtatctactgtgagattacattctcacatcaactccaagaaacagtctcccaatttaattatccccagttaaaatagatggacactgaggcttagggaggttaactaccctgactgagatcagttagtaagtggcagagttgggatttcaacttaggtcacccctaacagtcatgtgctttgccctgaaccaggattctccttgccagtgtcccttcctgctgctcaccctaaagagcatccaagatagctttcatctggggaccttatgaggtagtatagggcatttcactatattactgtcaccacaaaattaataattaatatttattcatcatttttatgtgccaggtgacttatggtaaggagcatagatacattatatcattcgacccttactttcccctttttaaacaagaagaaactgaggcttggtcccttagctagtatttgccaaaacaggaagtcaaccccatgtctttgtgactctggaagctgagcatttacccattagactatgttgagagaaaatccctccttgttgaagcctgtaaacatgggacctgagggaaggacagtggaagcccctgccttcagatgccatcagaggagggaaggccacaggttggagggcttgtcctcttacacatcctcctcaactccacccctagtaagaaacccaggcaagactaaagaagggaattctggtttctcatatttcctgtttagttctttgcagattggtgataaagcaagggctggggtgggtttgggggtaggtgactgcgactttggagcaaattccacaggccaggcctccaaggtcaaagtaaggggacttctatgtgagtgacccggttagcccagatagccatccctttttagtgtgtggatgggagcctaaagcgagaagaccatctctgcaccacatggtccagatggggctctgggttgagaggctttatactggccttcttcaccaccttaggactcacaacttccttttgctgtctgttattttttctaggtctccagaggcttgtggaagagaagcaggcgacccttcctgagttatcctggcttagcctcccaatctggctccccttccccttcccattcccctgctccccctgtcccttccccatccacccaactgaactgggtataggtcaaagctcctctctttccttttccttcctaggcactcattggctaggacctgtttgctcttttttttgtgcccagagatactggaacacgcttcatctaagtaactgtggggaggggtctttttgactctacaagtccttgagcaaaaagctgaaaaagaagcaggaggtggagaagacccagtgaagtgccccaagccccatcatggaagagggcttccgagaccgggcagctttcatccgtggggccaaagacattgctaaggaagtcaaaaagcatgcggccaagaaggtggtgaagggcctggacagagtccaggacgaatattcccgaagatcgtactcccgctttgaggaggaggatgatgatgatgacttccctgctcccagtgatggttattaccgaggagaagggacccaggatgaggaggaaggtggtgcatccagtgatgctactgagggccatgacgaggatgatgagatctatgaaggggaatatcagggcattccccgggcagagtctgggggcaaaggcgagcggatggcagatggggcgcccctggctggagtaagggggggcttgagtgatggggagggtccccctgggggccggggggaggcacaacgacggaaagaacgagaagaactggcccaacagtatgaagccatcctacgggagtgtggccacggccgcttccagtggacactgtattttgtgcttggtctggcgctgatggctgacggtgtggaggtctttgtggtgggcttcgtgctgcccagcgctgagaaagacatgtgcctgtccgactccaacaaaggcatgctaggtaagacatggggggctccagccttatcccctcaaactctggaaacctccttgctcctggaaattgctcttgtccttaccactgggttccctaggaccctgcacccaagatgttcccagagggctcagggttcctctgcacactcttccctcacacactccctcttcttggccttgggtcagggtgaagttgaatgtgacagaggggcttgcgggagggcagctggactggggcttgggccagtggttgggtggtggtctgcttcattctgcaggaggtggctgtggtaggatggtccctaccatttaatgtttcttcatagctttccctctggttatcctgttccctttcactgattggggaacaagaagccagtatccaaactccttggtataaatggggagagtcagtttggggtggttgggggagggggggagggtcctggatcttctgccagagaagctggttagactttctctcactcagatgggagtttccaggggacaggatgtagtctttgatggcctttcctgacagggactctgaggaggaaccccgtagactcacagagaaagaatcgaggccttactctgccaccaaattgccatggggtcttggacaggtctcttcttcctggggcttggtttgggcatgggaaaatgcaaagtttggagtagatgattttaaagattaattccagctttggttttatgaaggcagtgaaaaacaggagagtttttggaccagaaatattgagactggaaggagtaaaggatggattttgtgtgggagatttcctgggaagatgaaatgaattggagcccctttccccaggaacaaatgagagctctcctgctgctttgagggatcaaagcagggagaatagagaggaccctggggtggtctgtgatcctaggcacacccattcctccttcaaagtgagccaggggtaaaggtgtcactgtgtgtgtgtcagagtgagaaatgagacagaccgaagagagtggagagtttgcaggttctcccatatcttcattcctgcctttgaacccctggcctgcagagatgatcttctatctttgcttacaccattcattttctctcacttgctctaatctctgggtagacttaccttctagaagtttttcagatccttcagctccctcagtgctcatctcctgggagaattaaggtgtgtctgctcacaccccctctgcctgttttcctcctccttccaggcctcatcgtctacctgggcatgatggtgggagccttcctctggggaggtctggctgaccggctgggtcggaggcagtgtctgctcatctcgctctcagtcaacagcgtcttcgccttcttctcatcttttgtccagggttacggcactttcctcttctgccgcctactttctggggttgggtgagtgtacacttcctaagtcccttgagggcaggactgtgccttggtcactgttgtatctttagggcccagcacagtgccaggcacaccaaatgcaccttaaatctgtgtgagttgaacggatgaatgagttcctttctcccccagccatcttcaggccagctcctccctgcccaggacctgtctgctgctgtccagaatgctgttccttggcccactcctgagtcctccaccccacctctagttccatttttgagcctgcctccacaaagaggcctagtgggcctcagccccacccctgggctcctgtggacccagagttaccccctaccagagtctacacatttcctgcattacacaacaaaccttgctaacacccacacctgccagaaccctgacgccttgtccgcactgccccttcacttttgcaagcatggcaggcccgcttactctgcttcaactccaagctcctttctggccattcccacaacatctgcccttggaggcttttggcttgtcttttttctctggagatttattctcttttctgcaattactttcccgcccttccaactctgtaattcattttcaagatttaagatttgctctttccctttccctgagactcgcttgcctgtttcccatggtcccaaggatgggtgcttgatggctggcccacatgggagcttgtaaggctttatgtgtgagatggagtctcttcaaaagcctggaagacaaaaggggctcggggtccagagcagtggggcaggggatcaggactatggccatttgctaatgctgaattcttgaaatgcacttcaggattggagggtccatccccattgtcttctcctatttctccgagtttctggcccaggagaaacgaggggagcatttgagctggctctgcatgttttggatgattggtggcgtgtacgcagctgctatggcctgggccatcatcccccactatggtgagcagcccccggaaatccaccccaggttatctccctcctccctcttcttctgtgctccctgtggtgggttcccccagcctctggcctctctgctgatgctgtcactttctccctaccagggtggagttttcagatgggttctgcctaccagttccacagctggagggtcttcgtcctcgtctgcgcctttccttctgtgtttgccattggggctctgaccacgcagcctgagagcccccgtttcttcctagaggtgatggggctgagctgcatggggtggggtggggtgcgggctgtggagtgtggacggcagcaggggcttctgtgttcaaacaccaactggagtttgatttgatcctgtttgactgcctgccttcctcacagagtccactctccaggggactttatcttgcattctttgccttggaatgtgtccctgaggggttcttgggtggagaaaccaggggacctcttcacccatggatgacttaagattttgcagggaagggccttggccctgtcctgcatttacagctcaagagacattcccaccccctataccttcccctcctaaccccagcaggattaggtctttgactacatgcttgcccatcatttcccttacctttggtttttacattcctctgtactatggaattcccaagacctgtgcttgcctttttcccctggacaacactccccacccccaacccgcagctcttgcccaagtctgattgtcttgctatacctcagcttggggctctttcagagtggtgagtgcatgcccataggtcagggcttggtggtggggttgagggctgggaaccatttagtgtcctgtgactacagaagccaggtgggagggagggggtctataactctgggtcaggtaggggctgacttggatgtggggattgtgtctttggctctagaatggaaagcatgatgaggcctggatggtgctgaagcaggtccatgataccaacatgcgagccaaaggacatcctgagcgagtgttctcagtaagccacagccctcccgactcagacctccacgccctgcagccccagcccctacctggcccctctctgagtaccccccacctcagaccacactctaccgtaaggagattttcagggtatcatatccacctcctgcctcccattttgctaatgcaggggaaactgaggcgcctggccgatgttgggaaacacagagtgtgtgactgcccaccccttctcttgaccccaggtaacccacattaagacgattcatcaggaggatgaattgattgagatccagtcggacacagggacctggtaccagcgctggggggtccgggccttgagcctaggggggcaggtaatggtggacggggtggtagatagaagggagtgggggaagtggagaagaaggcaggactgaagtctatgtgtgtgggtgatgggtgagctgaagggaggtgggagggcagaaaagtggggatctatgggtgctagaacttagtatagtcaaggtctgactttgtctggtcccctgtaggtttgggggaattttctctcctgttttggtcccgaatatcggcgcatcactctgatgatgatgggtgtgtggttcaccatgtcattcaggtgaggagatgggtgggctgggtgatgtgtggtggttgtggtggtgtgtgggctgggagagaggtggggagaatggagatgcaggggacaagcgatgagggaaggtgccatgcagaccccctctgatcctgcagccagctcctctacttcgctagttcactcaacaaacttgtactgtaggctgaccaggattcagtttctattctgtgctgggatgaaacagatgtggtccaaggtcctcctggagtttatgttttggttaagaagcaggacgatgaggctcgtaatcccagcactttgggaggacgaggcgggcggatcatgaggttaggagatcgagaccatcctggctacggtgaaaccccgtctctactaacatacaaaaaattagccgggcatggtggtgggcgcctgtagtcccagctactctggaggctgaggcaggagaatggtgtgaatccgggaggcagaggttgcagtgagtcgagatcgcgccactgcactccagcctgggtgacagagcgagactccgtctcaaaagaaaaaaaagaagtgagacgaaacttgctatgaagcagggtgatgagagaagggtgggggaagggcagtgggagcacttggggcttgggctggggtggggacctaagtcctcaaaggtgaatgggagtcagacaggtggagtgggggtggctggggtggagaagagtgtttttggcagagggaaaagcaaatgcttgggaggtaagaaaaagtatagtggctgctgtgcgagaccctgaagtcccccaggagcgcagcaactgttgaagggaggagcagggagaagctggtgaggctggagaggagcaaggtcctaacagaggttgactccatttctcccttgttctgagatgatacacatttccgttttctcctctgcctgattctaatctctgagccttgtctgaagccctgttgtctgtttccattgtccttgactcttcagctactatggcctgaccgtctggtttcctgacatgatccgccatctccaggcagtggactacgcatcccgcaccaaagtgttccccggggagcgcgtagagcatgtaacttttaacttcacgttggagaatcagatccaccgaggcgggcagtacttcaatgacaagtatgtggggacttttaaacttcacttcttccctgttccttctacctcgtctcttttatgagtctaggggttcaagacaagacatttggggggcaaacacttgtggtttcttctcaatgcccagcttcccattacttcgctaaagagtgagtcttggagggggcatgaggatgacgggggagtgtctttcaccatcctggccttacaggttcattgggctgcggctcaagtcagtgtcctttgaggattccctgtttgaagagtgttattttgaggatgtcacatccagcaacacgtttttccgcaactgcacattcatcaacactgtgttctataacactggtaaggcggggtggctggtgggtgtcagaccaaagggttgggtggaccttgatgagaaggaacctttttcattcactatcttagggttctcaagctgagatccctggacccctgtgggaaggtggcagaggggcctgatagctaccaccaataattctgaaaatctaatggatgttggacattttcctgtaatagaatatctgacaaaaacatcaagtttatttgcctttggctgaaattataactcagtgaggtaaaattaatgcacttttgaagaaggtaaaaatcatccaaaatagcattcttgggaaaaagaaaaacaatcaataaaaggggtatttggtgcggatcattgcatgaatccactcctttttaatagtgattctcaaacttcagtatatgcacacgaaatgctggttttgtgagctagactgaaatttcccacctcatactgggcgagctttttccatgttgcaggaaaacaacaatggataggactttttattattttaaatgtttttctcagaaaaatttcctaagtccacggcatcgctactgcttatagtcagctagcacggacagaaagaatgaataagcagctaagactattaatgggagaacttggacaaagtcacactgttggacagatgatggtcattttctgctctaaagatccctagttcccatggtgatgttatttgatgttttgtgattagcactgtgaataattttgagagcccctcctactaactttcatacatgcagagccctgagccataagccgtaacagcctccctctcccatctgctatgactgcctgcttatcttggcctttgcccacagacctgttcgagtacaagtttgtgaacagccgtctgataaacagtacattcctgcacaacaaggagggctgcccgctagacgtgacagggacgggcgaaggtgcctacatggtatactttgtgagcttcctggggacactggcagtgcttcctgggaatatcgtgtctgccctgctcatggacaagatcggcaggctcagaatgcttggtaagggggagaggctgagtcagatctgatagtaggggccaggggctgcgggaggcagtcaacaggcttctcaccttgggctgtggaagagattggtcagagagttcctctctcatgttttctgtttagggggtgctgcaggatggggtggggactggcacagaagcttctctgggggtaaaggaggtaagcagaattgcaagtggttagggcacaggctttgaggttatgggttttgaatctcagctccaccacctgcctctggcctctggcaaattacctctatgagcctggttgtttcctctgcaaaatggaggtgataatagtacctgtgtcatagggttgatgtgctagatcaatgcatgtaaagcatcaattgccttggcccatggctggcattgaataaatgatggttactgatattattaataaacaattataagggaggttgaggaggagtgaaaagccttccttttggataccttggttggataccttcggaacaagtctcatcctgggctatctgaaagccagctgatgggacagggtgggctgtgggtgggtttcactgtggccaggctcatgttgctctctcctctcctggctccagctggctccagcgtgatgtcctgtgtctcctgcttcttcctgtcttttgggaacagtgagtcggccatgatcgctctgctctgcctttttggcggggtcagcattgcatcctggaatgcgctggacgtgttgactgttgaactctacccctcagacaagaggtagttggaatgtgttggaggcagggcagtggattcaggggaggggtggggtgaggaaggagggctgaatgggaagagcatccttaggggtgagaggatatacatttccattttctcctctaaaatctggtagctttggccgggcacggtgactcatgcctgtaatcccagtgctttgggaggccgaggcaggcagatcacctgaggtcaggagtttgagaccagcctggccaacatggtgaaaccctgtctgtactaaaaatacaaaaagttagctgggtgcctgtaatcgcagctactcaggaggctaaggcaggagaattgcttgaacccgggaggtggagctttcagtgagccgagatcgcaccactgcactccagcctgggcaacagagcaagactccgtctcaaaaaaaaaaaaaaaggaaaaaaaaatctggtagcttttgtatctactcctcaaagtcttaactgttaacctcaatttttggtctcctttccctttgtctctcaatttatttacattcctggtgtacatcctttacctctctgatctctccaaccttctctctccctcttggacactgcctgcatcttcctggacttcacttccctgccctccactcttcctttgcctccctcctgtaccttgcgccgtgctgcactgggggactcctgagcaggaccacagcttttggcttcctgaatgccctgtgtaagctggcagctgtgctggggatcagcatcttcacatccttcgtgggaatcaccaaggctgcacccatcctctttgcctcagctgcccttgcccttggcagctctctggccctgaagctgcctgagacccgggggcaggtgctgcagtgaaggggtctctagggctttgggattggcaggcacactgtgagaccaacaactccttccttcccctccctgccctgccatcctgacctccagagccctcactccccactccccgtgtttggtgtcttaactgtgtgtgcgtgtgcgtgtgcatgtgtgtaaaccccgtgggcagggactacagggaaggctccttcatcccagttttgagatgaagctgtactccccatttcccactgcccttgactttgcacaagagaaggctgagccccatccttctccccctgttagagaggggcccttgcttccctgttccaggggttccagaataggcttcctgccttccccatcattccctctgcctaggccctggtgaaaccacaggtatgcaattatgctaggggctggggctctggtgtagaccatggaccaaaagaacttcttagagtctgaagagtgggcctcgggtgccctctcacatctcctgttggatgctgggggagaagcaataaacctcagccctctggcctccactttcctctcaatttgggctgcaaatatgaagcctgaattttatgaaattagctttctgattcttatttattaatagattaagttctgaggcagctccgcaggactgtgtgtgaatgtgtatgtatacttacatatgtgtgtgcatgtgccatggggcggggggtatcactatactgtcctcaaatataagccaagggtaatttcagcggatgcacacacaaccctgcctcccacagttcctcccctaatctggtttctgtgttgagcctgggatggaggagccctaggccagcctgggataagagtcccacagtctagggagatctgagggcatccgacaaggcccatctccttccctcctcaagaagcagaggcctcctctggagtgagaggctccacccactacagcacaggcgggaatagcacagctgccctcccatgctccctacctgtcccctcacagggaggggagcaggggagggaaagaaaccaggcatctggtcaaaccagcagatcaaaaagcacaaagagctggggcagaggcaggaagcaggggccctcctggcagctcctctgagtggggagaggttgggcagtgagtgagggacccctaatgcagggactagaagcctcagtttccccattttacccttccacacaatagcctctgtaggttaggctgccccatcccaccctactctgtgtggctgctttctttggtgccctcccctcaccccactgtagctgtgacgtgttgtagtttttagatgtttgtaaaatgtttaaaaaaatgttaaaaggaaaaaagtgaaaataacaaaaaagaaaatcaaaattcaccttcgtcatgctgcgtccagtgccccaaccctgtggtcactctccccattttgtaacactgtaccaggtggtgactgtttaactctttggtgtctgtgctcaaaagactgccttctccagtgcccagtgtatgagtgtgtgccctgtgcccttgtccctcactccccacatgctggacgtagccctcttcctcgcacccctgggagggacccatccatctcccttgctctcctggggaaccctaaacccaactctgttgatgtgaaaaatgcagtgaaaaatattgacgaaaaataaaacggaaacaaatcctcaaaatacaaaatggctatacctgcttctgtgactctccacctacatccaattctcctaacagccttggagggtaaaatggtgagatggactgaaggtcagaataacatggtgtaccagatttacttcctaaattggcctctctaccttgatctttcccctacagatggagggccctctaagtctcccagatttgaaaactttgggagtaatgtttcataagaatagaaccaactttcctctaaatcttctggtatgctttttaaaaatatagaccccagactccactcttgacttgttgaatcagaaccctttttttttttcttggtttggaaggatagggaccttgaatctacgtttttttttttttttgagacagagtctcgctttgttgcccaggctggagtgcagtggcgtgatcttggctcactgcaacctccgcctcccgggttcaagcgattctcctgcctcagcttcctaagaggctgggattacaggtgcctgccaccacacccaactaatttttgtatttttagtagagatggggtttcaccatgctgcccaagctggtctcgaactcctgacctcaggcgatccgcccgccacggcctcccaaactgctgggattacaggtgtgagccaccacacccagccagaagtttcattttaaacaatctcatgggagttcttacctgagaaaatctgaaaaccactgccttggggttaccattgactcccctctcactctagtccatttctgttccaatcaaaccattttctgattttatggtagctctcaaataaactccttcctttccattcccacagatgacttgtaagtcagggttctaccctcactctggattgatctctgttcctccagtctcccatgccaactcacttacacatcactgccagatccatctgcccccagatgctctctggcatgtctgtactcaaaatttgtcaatgactccctactgcccaaccacatgcaccttaaattctttagctagaaatggtcaagatatatgttaaccgggccgggcgtggtggctcacgcatgtaatcccagcaatttgggaggtcgatgcaggcagattgcttgaggtcaggagtttgagaccagcctgaccaatatgatgaaacctcgtctccactaaaaatacaaaaattagccgggcatggtggcaggcacctgtaatcccagctactcgggaggctgagacaggagaatcgcttgaacctgggaggcgaaggttgtagtgagctgagattgggccattgcactccagtctggtcaacaagagcaaaactccgtctcacaaaaaaaaaaaaaaaaaaaaaaaaaa

SEQ ID NO: 1705 - DNA, 3900 bp, Homo sapiens
gggagtcaagtcaggccctgttttcaaggagacaacagagcactgaagactaacaagtgagcggacaattgcaatactgggtactaggtgctacgatgagataaacacaggatgctaaggaggcaagttacccagacttggccggggttggagaggtggaatgggaggcgggcagagaatatttccgagatttagggaaacagttcagcagaaacaacatgagaatccatttctcagtccctcatagtgaggttttggctttggtagctgcatgtgtaaaggacaggaggagagagaattttgagggagtctttccttctggtgtagttagggtgtggttatgtgtggttggagcctagggggcagctgatggtgatgagtagggtaccaggaggagaggaacgggccagaccaccccaggccttgtagcccttgttaggcaattttgtctttatcctagaagtagtgggaagctactgaggttttaagcagggatgtaacaggatgtaatttttccaggatgattcttaacttgtaaaattatttaaattttattttgtatccttaatatatttacatatttctaaatgtttttccccaacttctcattttgaaaaatgtcaaagccacagaaaagttgaatagttcaaagcaacaccctctacctttcacttgacccaccattttttgcatttatatttattttatacttgtacatatatactcatatatttaagtactttacatatactttaaaatatatttatatgcttttttggatgaaccatttgaaagtaagttgcagatagcatgacatttcacccctaactactccaatatgtatctcctaagaacaaagatattctcatacataaccacaataaccttatcacactcaagaaatttaaactatgacatacactgttttccctagcctttaaaaaaaattaaaacttccagaaaatttgcaagattaatacaatgagcaacccatttatccactcttcacctaggttcactgataagattttgccagacttggctttgtatctcttttaatgtatgtgtgtataataataatgaaataataataattatttctgctgaatcacttgagttaggtgcagaaatcttatttatttatttttttttgagatggagttttgctcttcttgcccaggctggagtgcaatggcgtgatcttggctcactgcaacctctgcctcctgggttcaagcaagtctcctgcctcagcctcctgattagctgggattacaggcatgtgccaacatgcccggctaattttgtatttttagtagagacggggtttctccatgttgatcaggctggtctggaactcccaacctcaggtgatccaccctcctcggccacccaggattacagggattacaggcgtgagccactgcgcctggcccaaaattctttttttttttttttttaaacagagtctcactctgttgcccagactggagtgcagtggcgccatcttggcccactgcaacctccaccttctgggttcaagtgattctcctgcctcagcctcctgagtagctgggactacaggctggtgccaccatacctggctaaatttttttgcatttctagtagagatggggtttcaccatgttggccaggctggtctggaactcctgacctcaagtgatcctcctgctctggaactcctgacctcaagtgatctgcctgcctcagcctcccaaagtgatgggattacaggcgtgagccactgcacccagccacaaaattcttttttttttttttgagatggagtttcgctcttgttgcctaggctggagtgcaatggtgcgatcttggctcacagcaacctccgcctcctgggttcaagcgatttgcttgcctcagcctcccatgtagctgggattacaggcgtgcgccaccactctggctaattttgtgtttttagtggagacggggtttctccatgttggtcaggctggtcttgactcaggtcatcagtccgcctcggcctcccaaaatgctgggattataggcgtgagccactgcgcctggccccacaaaattctttacacttaattgctatgtactttcaatgtgtatctcctaagaacaaggacattttcatacatatccacaataccattaccacatccaagacatttaacattcatacaatactataatcacatacagttgatattcagatttccccaactgtctcattggtgtctactatagtttgaatatgtctcctccagaattcatgttgaaaattaatccatggtgttggtattaagtggtggggcctttaggaggtaataaggctatgagggctccaccctcaagaatggactaacgccttttgaaagagcttgagggggtaagttggccccttctgtcccttctgccatgtaaggtcacctcgatggcgtatctatgaggaactggccttcactagataccaaacctgccagtgccgtaatcttggacttcccagcctccagaactgtgagaaaatacatttctgtttataaattacccagtcagtggtattttgtaatagcagcacagtctaagtaaacattataaatgtttaattttcagaaaccaatcaaggatcatgcattgcatttagctgactttaagtttgtattctgcaaagatcactggcttcagggtggagaatggattgtagaggaggcaagagtggaaacagggagacaagttgggaggttactgtagcagtctaggtgagagatgatgatgatttggaccaaggtggtggtggtggtggtggaaatggagagaaattgtggctacaggatgtatattaggaaagtaaaacctacagggtgtggtaatggcttggttgtgggagggaaagtgtcaaggataattacaaggtttgtgcatctaaagttaaaaaaaacagttcaaataattcctgtatatcctttatcctgatacctagattacccaaatattaacaattcactgtttgttttatttgtatgtacctatctacaaatatataattattttctggactgtttgagactaagtttcagagataaagcctattaaactctacctgtgatggttaacttttttttttttttgagatggagtctcactctgtcgcccaggctggagtgcagtgatgcaatcttggcttactgcaacctctgtctcctgggttcaagtgattgttgtgcctccgcctcctgagtagctgggattacaggcgtggacaatggcgcctggctaatttttgtatttttagtggagaggggggtttcaccatgttggccaggctggtctcaaactcctgacctcaggtgatccacccacctcagcctcccaaagtgctgggattagaggcgtgagccaccacgcacggcctgtgatggttaatgtcccaacttctagaggattggtgctcagatatttggccaaatatgggtgcttctgtgagagtattttgaatgagattaacatttgaattggagactgagtaaattgccctccctaatataggtgggtcccatccaaccagttgaaagcttgactagaacaaaagactgacccactccggagtaagagagacttccttctgcctgactgctttgagacccggacattggcttttctcagccttcagactcagaagtaaacactggctccatctgggtcttagactcggcctttggactggaactacaccattggttctcaggcctttgaacttggactggaactatatcatcagttctcctgggtctccagcttgccaacttaccctgaagatcttggggatcttgggatttattagcttccataatcaaaaagccaattttttataataaaactatctatcaaaat

SEQ ID NO: 1706 - DNA, 1366 bp, Homo sapiens
gaagatacgtcctgacagcatctctcacctactgtcttgaagccccaaatcaccaagaaactgccataaccaggaactctcctgcttcctcaagctatttggttctctgagggggaaggagttgggtaagtcttggaggaagcaaaggagtgggtagaaaaaggggaaaatccccatttattccctaaagctgtctcccagagcccataaaagggctattgcagggatggcaagaccccaattcctctggccagaaacctttaacacttgactccaaaaactaagctggagctgtggggttcagtaggggtgttaggcacaggtgttaggggcatccatcatcagcagagggaacacccctgccctccggatcttcctccagccccttttctcttgcagccacactcctgggcctccagaaatagccacaaaatggctctgctcagcagggctttggtttcctggatctctgtagatctcaacatgtaagtttcccaaaacagtgagcaatccaggctcttctgcctgcccacctcaattccttttctgctcccaggagccactgtttctgccccatggggatggaaagccagtggaaacaaggaccaagagccaaacatcaaaaaaatcaccctggaagagcagggagagacatgtgcacttccctgggccacttcaccagcgtcacccatcgttagcagccaccagctgccccatgccctcacggatgtagacagactggatctccttggtcttgaggcagagatcgcaggcccagacggcagaagcttcagtggtcagcagcccataggcgctctcagtcatgcctgtgcactcacggtggaaccatttctggcaggaggcctcacacagaatggcatcctggtcatcgttcacctcactccgacaggcaccacatgggtacaccaagcctgggggaggctggggcccggagcccccacctgccttgccagggggtgccaagctgttggcatctggagtgcccccaccccgcccactgctgttcggggggaaactgggctggttcccattaacagcagcagccggggagcctgagtggggctcctggggaaaagcagtagaagcaggtggattcaagggcttccccccatcctcaccaccagggccaggaaagccagggtccggaccaggaaagggacttgtgttaggcggcaggctggggagcccctgaccaggtctctggagaggagaagggccaaaaggagcccctggctgagcaaatcgttgggacagagaaggtgggcccagctctgctctgggaggctgtcccatggtgggtgagatcatgggaccaaatccccccactgggcccggcatcatctgc

SEQ ID NO: 1707 - DNA, 2440 bp, Homo sapiens
ttgtctgggattttaaaatcattttattaatccaacagtacaaaagacccccaccaccaccgcattctgccatcactttgttccaaaaagtagtggagtgagagagcgagagggagcagatccagcaaaaacactcccccaggggccattttacaaaatgcggagcaggggaagacaacacaaaaacagcaacagataaatggggcaaacagaacaacaaacacaagagttgagcagcggggtgggggtggggggttgccatctacgccgttttagtgtgagggacactgggaacgatgcccagaggctgctctcctcccagcctcaaaggttgtcagctccaccagagcagggtcttctctcctcatgccaggaactgagagaagtgggggtaggggaccactaggtctttgccactgtatcttgagctgggggactcctaacttctccgagggccacaccccatgcctgccttccccaccccatggaggaatgtgtgcatgaacagaaaaggagaacgagcagcgctaaggtcctcatcaggccccaggcccatctctggcaggcagtgcttaaaaaataaaaaaagacaaataaagcccagtgcaggcctttggctgagaggaatgagaattgctaattaatcaccaggcccaagaggatatgaaagaatagcaaagagaagcaacaaactccaggctcttctacctttgagtaccatggcaatgaggatcccgccgcatcccctacccacaggctgtgacagggcctcacttggatccttttatcatggaggaaatgaggtatagggctctgcgccttttcaagctttccttcaatcaagccaggaaggcaggggaataagggcgccgaaagttgaagaacacacggagtataatgtgcaacagatgggctgggggaggagggtaccaccaaagtccagactttcaggacagcccaaacttcaaatattctggtctgtcagataacatatcccaatttttggcaaaaatatggtcattaggagaaaagcacgagagaggctgagaaaggaccagtgactttggtatgaagaagatacgtcctgacagcatctctcacctactgtcttgaagccccaaatcaccaagaaactgccataaccaggaactctcctgcttcctcaggctatttggttctctgagggggaaggagttgggtaagtcttggaggaagcaaaggagtgggtagaaaaaggggaaaatccccatttattccctaaagctgtctcccagagcccataaaagggctattgcagggatggcaagaccccaattcctctggccagaaacctttaacacttgactccaaaaactaaggctggagctgtggggttcagtaggggtgttaggcacaggtgttaggggcatccatcatcagcagagggaacacccctgccctccggatcttcctccagccccttttctcttgcagccacactcctgggcctccagaaatagccacaaaatggctctgctcagcagggctttggtttcctggatctctgtagatctcaacatgtaagtttcccaaaacagtgagcaatccaggctcttctgcctgcccacctcaattccttttctgctcccaggagccactgtttctgccccatggggatggaaagccagtggaaacaaggaccaagagccaaacatcaaaaaaatcaccctggaagagcagggagagacatgtgcacttccctgggccacttcaccagcgtcacccatcgttagcagccaccagctgccccatgccctcacggatgtagacagactggatctccttggtcttgaggcagagatcgcaggcccagacggcagaagcttcagtggtcagcagcccataggcgctctcagtcatgcctgtgcactcacggtggaaccatttctggcaggaggcctcacacagaatggcatcctggtcatcgttcacctcactccgacaggcaccacatgggtacaccaagcctgggggaggctggggcccggagcccccacctgccttgccagggggtgccaagctgttggcatctggagtgcccccaccccgcccactgctgttcggggggaaactgggctggttcccattaacagcagcagccggggagcctgagtggggctcctggggaaaagcagtagaagcaggtggattcaagggcttccccccatcctcaccaccagggccaggaaagccagggtccggaccaggaaagggacttgtgttaggcggcaggctggggagcccctgaccaggtctctggagaggagaagggccaaaaggagcccctggctgagcaaatcgttgggacagagaaggtgggcccagctctgctctgggaggctgtcccatggtgggtgagatcatgggaccaaatccccccactgggcccggcatcatctgc

SEQ ID NO: 1708 - DNA, 902 bp, Homo sapiens
gtggggttcagtaggggtgttaggcacaggtgttaggggcatccatcatcagcagagggaacacccctgccctccggatcttcctccagccccttttctcttgcagccacactcctgggcctccagaaatagccacaaaatggctctgctcagcagggctttggtttcctggatctctgtagatctcaacatgtaagtttcccaaaacagtgagcaatccaggctcttctgcctgcccacctcaattccttttctgctcccaggagccactgtttctgccccatggggatggaaagccagtggaaacaaggaccaagagccaaacatcaaaaaaatcaccctggaagagcagggagagacatgtgcacttccctgggccacttcaccagcgtcacccatcgttagcagccaccagctgccccatgccctcacggatgtagacagactggatctccttggtcttgaggcagagatcgcaggcccagacggcagaagcttcagtggtcagcagcccataggcgctctcagtcatgcctgtgcactcacggtggaaccatttctggcaggaggcctcacacagaatggcatcctggtcatcgttcacctcactccgacaggcaccacatgggtacaccaagcctgggggaggctggggcccggagcccccacctgccttgccagggggtgccaagctgttggcatctggagtgcccccaccccgcccactgctgttcggggggaaactgggctggttcccattaacagcagcagccggggagcctgagtggggctcctggggaaaagcagtagaagcaggtggattcaagggcttccccccatcctcaccaccagggccaggaaagccagggtccggaccaggaaagggacttgtgttaggcggc

SEQ ID NO: 1709 - DNA, 3985 bp, Homo sapiens
ttgtctgggattttaaaatcattttattaatccaacagtacaaaagacccccaccaccaccgcattctgccatcactttgttccaaaaagtagtggagtgagagagcgagagggagcagatccagcaaaaacactcccccaggggccattttacaaaatgcggagcaggggaagacaacacaaaaacagcaacagataaatggggcaaacagaacaacaaacacaagagttgagcagcggggtgggggtggggggttgccatctacgccgttttagtgtgagggacactgggaacgatgcccagaggctgctctcctcccagcctcaaaggttgtcagctccaccagagcagggtcttctctcctcatgccaggaactgagagaagtgggggtaggggaccactaggtctttgccactgtatcttgagctgggggactcctaacttctccgagggccacaccccatgcctgccttccccaccccatggaggaatgtgtgcatgaacagaaaaggagaacgagcagcgctaaggtcctcatcaggccccaggcccatctctggcaggcagtgcttaaaaaataaaaaaagacaaataaagcccagtgcaggcctttggctgagaggaatgagaattgctaattaatcaccaggcccaagaggatatgaaagaatagcaaagagaagcaacaaactccaggctcttctacctttgagtaccatggcaatgaggatcccgccgcatcccctacccacaggctgtgacagggcctcacttggatccttttatcatggaggaaatgaggtatagggctctgcgccttttcaagctttccttcaatcaagccaggaaggcaggggaataagggcgccgaaagttgaagaacacacggagtataatgtgcaacagatgggctgggggaggagggtaccaccaaagtccagactttcaggacagcccaaacttcaaatattctggtctgtcagataacatatcccaatttttggcaaaaatatggtcattaggagaaaagcacgagagaggctgagaaaggaccagtgactttggtatgaagaagatacgtcctgacagcatctctcacctactgtcttgaagccccaaatcaccaagaaactgccataaccaggaactctcctgcttcctcaggctatttggttctctgagggggaaggagttgggtaagtcttggaggaagcaaaggagtgggtagaaaaaggggaaaatccccatttattccctaaagctgtctcccagagcccataaaagggctattgcagggatggcaagaccccaattcctctggccagaaacctttaacacttgactccaaaaactaaggctggagctgtggggttcagtaggggtgttaggcacaggtgttaggggcatccatcatcagcagagggaacacccctgccctccggatcttcctccagccccttttctcttgcagccacactcctgggcctccagaaatagccacaaaatggctctgctcagcagggctttggtttcctggatctctgtagatctcaacatgtaagtttcccaaaacagtgagcaatccaggctcttctgcctgcccacctcaattccttttctgctcccaggagccactgtttctgccccatggggatggaaagccagtggaaacaaggaccaagagccaaacatcaaaaaaatcaccctggaagagcagggagagacatgtgcacttccctgggccacttcaccagcgtcacccatcgttagcagccaccagctgccccatgccctcacggatgtagacagactggatctccttggtcttgaggcagagatcgcaggcccagacggcagaagcttcagtggtcagcagcccataggcgctctcagtcatgcctgtgcactcacggtggaaccatttctggcaggaggcctcacacagaatggcatcctggtcatcgttcacctcactccgacaggcaccacatgggtacaccaagcctgggggaggctgggcccggagcccccacctgccttgccagggggtgccaagctgttggcatctggagtgcccccaccccgcccactgctgttcggggggaaactgggctggttcccattaacagcagcagccggggagcctgagtggggctcctggggaaaagcagtagaagcaggtggattcaagggcttccccccatcctcaccaccagggccaggaaagccagggtccggaccaggaaagggacttgtgttaggcggcaggctggggagcccctgaccaggtctctggagaggagaagggccaaaaggagcccctggctgagcaaatcgttgggacagagaaggtgggcccagctctgctctgggaggctgtcccatggtgggtgagatcatgggaccaaatccccccactgggcccggcatcatctgcccactgggaggactaaagttttgacccagaggctggttgaagggttggctgggaaagttcatgttgcctgggggtgggtagccaggaccctgggggggcatgttgaaagcagggcccataggattgggagggaaggggggtggctgtcgacggagtggctgggggccccctccacctccagtgctgtagcctgggggtacctggcccgccatgcccccctgcacacggaagcctccgaagggcacaggactgccaaggaatggaggggctgcaacccccactttgggggctccgaagtcatcttcaaaagggttggatgcaaccaggtgatccaccatgggagttgggggtggtgcaaactccgtcagatgtgagtatgcagggccctagtgagaaacagttgagggaaagagggtcatggagggaaacacagagctaaaccaagagagcactaccaacacaatacacattttggaggctgatactgtgggcagctcaggtctaaaatcaatatggaccacaggccaggtgcggtggctcacgcctgtaatcccagcactttgggaggccaaggcgggcagatcacgaggtcaggagatcgagatcatcctggctaacacggtgaaaccccgtctctactaaaaatacaaaaaaattagccgggcgtggtggtgggcgcctgtagtcccagctactcgggaggctgaagcaggagaatggcgtgaacccaggaggcggagcttgcagtgagccaagaccataccactgcactccagcctgggcaacagagcaagactccgtctcaaaaaaaaaaaaaaaaaaatggaccacaggccaggcacagtgggtcacacctgtaatgctaacattttgggaagccgaggcaggaggatcccttgagcccatgagtttgagtagtaacacagcaagtctctgttactacaaaaaaaaaaaaagaaaagaaaagaaaagaaaaaagaaaaaaaaaaagacaagaaaaagagggtggagagtggaaccaacatagtgcagtaactatgttttaaaaacaggcagaactaggatggaatcccagctctgaccctgaaaaacaacctcaagactgtggagcatgtatttaacatttttaacccccagatttctcatctgtaaaatagggataatgcctatctccccaaactgttaaagcatgttagcgcaatccctggcactaaaaaaaggatcagtaagtggtaggtgttacgttatcatcaggaggaaaccaggacaggaaacatggaggagactggaaccctgcgtggtaagaactttggtcgaatcatctcttaggagaggatactttcccctaaacttgttataaggttcagcgaaagaacaagaagcaaagcaagaaagacagttttctctctcctccctgcagctgatacaagatacaaacagatactggaatggcagagtagacagtgtgccgccaaggggctgctgggaaccaaacccaccaccaaccaccattcacctgagtatttgacttccttcgcttcttttc

SEQ ID NO: 1710 - DNA, 4901 bp, Homo sapiens
  SITE (1005): n equals a,t,g, or c
aaggcagactctgtggagggctctggccttccaggtcctgtgtgtctggtcccaggcctgtcaccacggtggtctcctgcaggtctccctggactactgtgtctcctgggccaggaggctccacaccacaaacatcaccttccagggtgccctaatgcagatgcagcagtgagcagctgctagccctccccgcctcccttccttcccacagcaaatctcctcaccttgacctcagtctcctctgttagaatgctgccagactgagggctttcagtctggaagagcgtccctgcggtaggagaaaaggcgcagaaaaacccactgccccagctgaatttcctttgcagccctctgtccatcccacgggcccctaccaggttggaagaggcaggaaaaagccaggatggaatgagaaaaggagtttgtcaactgagattaatggaggaactaaaacgaaccagcctccctttctctgaggaaactgagaaaccccaaaatatggagaatagctttgtccggtaagctatgtcctaagcagggcccagtaccttctccatccatggtcccagctaattctttcccatctgtcttggaggggctgtgaggggcctgcagggctctctcagattctgggtccatcctggatgccgggcccagtgtctccactggcaggctctgggaggagaagtgcaaggagaagggctgcacccaagaatggggccccagcccacatcccagaaacacacacattcagtcatgagctggcccaaaagggggctcggggcagcaccaagtgctcgggatttcccagcctaactcactgggaggaggaactttcaggggccaggtttccggttcccagcgccgcaccacagaccagggactggtttgagtccaaacctggtgccccgcctccagaaggtgagctagagcggacgattccctcccagcaagacaagcagcacttccttccccgcagatgaacagcccgcgatattataatantaagggtgggaagaaggcaagagaacaaagtcccctgggtgcccacgggtcacagttatgcctcccagggtgtccctgcagctgccctctcaactggacaactacttacatctctcaagcctttctggcctttcccgctggcccctgacactcccccgacacccgtctcccagcagctgctcacagaagcccatcccaccccaaccacagacagcctgtctccagggcactctcagcctggacatccagccctggccacacagcctcggcctcctccctctgcctactccccttccatagggccctggcctgccacccgccccgtggctccaactatccctctgagagtaatgcttcaccttagttatgtctttgctattttcaaaacatttttattctcatggtcccccctacaaggcaaaaatcatgacgcccgttttacaggagaggacagagaggtgaaatggcatgcccaaggtcccccagctgtcaacaaagacacctcaacaggaggccagggctctgagagcctggtgcccgtctgctcatacctgccttccctctgccagtgagccccagtccattatcttgctccagcgtcatccccaaggtcaactccttactcccagctgggttcctcaagggcacctcaaactcaacatgttgaaactgagcttctctcctcctcccctcctggtggctctaatatacaaagtcgctacgtcttggaactctcagagatgcctttgacaaatttttgccatcccttctctagccactcagttccccatcctgccaacccccttctccctcctcagtgggcttctgccccaccagctgctacctggactgctgcagggggtctttgaaacactctctccctgttcccacccagcatgcacagtggcttcaccctctgcctgagacaatgattgtcctgatccctctaacccaaagccccacactgatttcccatcagggatgaggcctgaaggcctcagccaggctcttccggtctcttccaggggttcccaggctctgtccccaacctcactccaacactggctccaacccacgtctccacatcacccatgggtgtcccacagtctcccccagcatggcgttccccactatcgcctcaggacctttgttcacattggtctctccattcgaaatccatccctacttgtctcagcttacccaactggtcccttccttcatggcatggtccaagtgccaacacctgacccctggggcctgatctacttcttcctgctactggaattcctctaacagccagcaggaagtgatgtaggtgaccatcaggactaaggaaaaggacccaccaagaaagaagcccagcactgcagaaacaccccccaaccccacccccatggttcccaggcccgctcttcctacctcggagccagcaagcacccagctattatcagagtctgggcaggaggccatagttgctgaggtccctgaggctgctgtggctgccacctgcagaagaaagctctcttaaggatgggagctcccttcaggaggggcagaatgcagaaagcagccttggctgggttccaaggttcaagtgctgggcagcagcctccagaaccaagcctggttccagtccttctctccctgacaccccagctcttctaagcagtatttgccttgcaaatcagaatctgccaacacccacagagaagccagcctcttccagggaccaacagggccttggaaaactgaactgaccttgaaaggtcaaagtagcataggctggaaaggctctggggaattccagtccagccccctgacatttgagtcagggaagatgaagcccagcaaggttgacagactcaacttgccaataagaagacttgttaataagaagagcagggaaacaacacagccctcccttcacaacaccaggtacctacacaatcactaccttctcccccaggacctggaagggaagactcaatggcctccttcagccctaagtgtcccaccacttgcccagcataagtccttggtatggtctagttcagtggttctcaatcttggctgcacattggaatcacctaagattttgattcaattgagttggggggtaggcccggctgtgggtcttttaaaaaaccactcaaatgattctcatgcgcagccagggttaagagccactggcatagcttaaatccacctggatgcaccttttataagtctcctcatcactctcagtcttcatcctaaattctgtttaccttcttagtaatcgccagagtttggtcttagggaacttgaaggtgactgggaaaatggatttatggcaactatcatgtatatatacatcactttatagcttgcaaaaaatagacaaaaatcagggctatggtcctgcacccggttaatctgctctgacttgacagggataggggagggatttttccagtttccaaagcctgactgacacaaagcagggtaagaagagagggatccgccccttcatccaaggctaaaacagttccctcaggcagctcctgttgggaccaggcataaaggtggaaggatagatgagctgacctctcaagagtactggattgtgatccctcagaacaggataaatgactgcttcccgagcactttataagaaaactcaggaaaagggaagtgaggctgggagagtatggcagttctacctttgaaaccaaccacattatccccttctgtttgagctgttttcaagtcctgcgtggtgccctaagtaacctcctgtggctcctgccagtcaagatccaagtcctggataggtctttcccaatgcccatcctcccagacacatgcacccattccacacggagacaggagaatggctgcaatgacctccctgtaccaaatccaacaggacaccctggcatgcatctgtaagtatccatagagccatggctgttcagccttccgcttgtggctccacccccgcccttgttatcatctccccatccccagttgctgactgttaacaggtggtggcaggaaggaagtggcagcagcttgggctgaagtccctgtttatccctagctgtgtgtgcagcctgctcaggtcctctagaaccaggcaccatggcaaccacagtgatgtcagacccactgtctccatggaaaccagcaaaggtatttgggtcaacaaaacaaatacttatgagacccaaataggagacactctgaaactcctatactctggggtttccaaaccctgatacctctttcttgggttaggttaaccccagggtcaaaaaaacacctctctctcccaagccagcatctcactgccttattaggaagttccttctgctgtctaatctccacccttccctgctgtgtttccagatctttttcttttcatcgaccttctggaagaaaacccacctccactccctccctccacccccttcttttcattcaggcaggattcaacaaacacctcctgtaaggattatgacagagacttctgctatttctaaaaaacagctaaagggggagctctcccactcagcataaagctaggaagtctcgcctctagttaatttaaactcctctaacagttgctcctccaaaccgctaaagcaaaggatctagggccacttgcctggggtacccagagcaagttcctgttgtgttagcgtcggcacctggccttcctcccccagcccagaaatgaaaagcagctcattccttctagattagttccgccttcccttttccttattccacccccttcaaagcgaatctgtggaccccttcccagctaaggcattacctgaaccagctcttgcttcggtcttcagcttaacttgttgcaggcttccctttgtttgcagcccgagaagaaaatc

SEQ ID NO: 1711 - DNA, 848 bp, Homo sapiens
ttgtctgggattttaaaatcattttattaatccaacagtacaaaagacccccaccaccaccgcattctgccatcactttgttccaaaaagtagtggagtgagagagcgagagggagcagatccagcaaaaacactcccccaggggccattttacaaaatgcggagcaggggaagacaacacaaaaacagcaacagataaatggggcaaacagaacaacaaacacaagagttgagcagcggggtgggggtggggggttgccatctacgccgttttagtgtgagggacactgggaacgatgcccagaggctgctctcctcccagcctcaaaggttgtcagctccaccagagcagggtcttctctcctcatgccaggaactgagagaagtgggggtaggggaccactaggtctttgccactgtatcttgagctgggggactcctaacttctccgagggccacaccccatgcctgccttccccaccccatggaggaatgtgtgcatgaacagaaaaggagaacgagcagcgctaaggtcctcatcaggccccaggcccatctctggcaggcagtgcttaaaaaataaaaaaagacaaataaagcccagtgcaggcctttggctgagaggaatgagaattgctaattaatcaccaggcccaagaggatatgaaagaatagcaaagagaagcaacaaactccaggctcttctacctttgagtaccatggcaatgaggatcccgccgcatcccctacccacaggctgtgacagggcctcacttggatccttttatcatggaggaaatgaggtatagggctctgcgccttttcaagctttccttcaatcaagccag

SEQ ID NO: 1712 - DNA, 293 bp, Homo sapiens
gcggtggctcacgcctgtaatcccagcactttgggaggccaaggcgggcagatcacgaggtcaggagatcgagatcatcctggctaacacggtgaaaccccgtctctactaaaaatacaaaaaaattagccgggcgtggtggtgggcgcctgtagtcccagctactcgggaggctgaaacaagagaatggcgtgaacccaggaggcggagcttgcagtgagccaagaccataccactgcactccagcctgggcaacagagcaagactccgtctcaaaaaaaaaaaaaaaaaaa

SEQ ID NO: 1713 - DNA, 160 bp, Homo sapiens
ggagatcgagatcatcctggctaacacggtgaaaccccgtctctactaaaaatacaaaaaaattagccgggcgtggtggtgggcgcctgtagtcccagctactcgggaggctgaagcaggagaatggcgtgaacccaggaggcggagcttgcagtgagcc

SEQ ID NO: 1714 - DNA, 15980 bp, Homo sapiens
  SITE (2577): n equals a,t,g, or c
gcctgtttgacccatgggcaatggaccttccaaagggagctatctagcactttcctctccacagcatgtggcttcaggtgtctgcctatcctgctctagccagatgacctgtccctttgattttgaacagagtctcagtgatgacctcaatggatgaccctcccctctgctgaatgcctcccctggggctgagcgaaggtaagtgccccatgctggtgagaactcctgcaaaggggccctgctctggagaggaagtggagggtggggggaatggtgaggattagtggcacccctcccatttcctacagtagccatcccctcagacctgcaggctgccagtggcagaatttgccccctctgtgaaccatctagctataggctataacacccttacctcaggcctcacctttgcctagcctgaaataccttcccccattctcccatctctgaaatcctattatctttcaagatccaactcaaaggccacccctttcttcctcttcacccagttggcagactgctcctggcaccattaagagagtactattaaaattctgctttgtatgcagctaatccaattagcctcggggcaaggattggggggccccacagcatctagcacagtattgagacctgaatgctagttagcatcttttcccgccagctcctgccacatcggggaaccaacaccctttcctcccatatcagtagctcccagtggctcccagtttcccccttagaggttaagtacaataaaaataactgctctgtttcagtgccctttagcttgcaaagccttttcatgtatcttacattgactcatctcaccctcgggacagcctctgagagcagagtctgtggtctccacttcaatgatgagaaagctgagcccttaagcaaggagagccctcttgcccaaggcccacaggtgggcagcggtggagaccgccactctggggtttccgacttcaaatctcgctcaggtcaaagctctggttagaaaagatctgggctgggagccccctggcccaggaacaggtgagccaggaacaggcccagccagaagaacaggtgagcggggaaggggttcactgttgttctccatttgggagcggcagtcacctatcctgggtgccaaaggttaccaaagagatgggtggccaccttaagggagacctgggagaggtgggacagggaactcagataagtgcttaacaaggggcttctgtggctcaggcagctgagttggggaggggaagaacctgttgtctgatttaggcaacagccctccacacccctaccctgcaacctgcactgtccctaccagacccctgctgtgagcatgtgaaggggccaggaacatctgtggcccagaaccaggcaggatgaggagacattcctgtgtcagggtaaccctgggaggttcccatggcaacagccagccagtccagtgtgtgtccttgggcccagccggacgaggctgggagccactctcaaaaggagcaatgtgcctctgaccttccagaagccaataggggtggtcaggctgggaagcgaagtgacccactaccacctatgacccacccaccccatctgtctccaccacctgtcaccccaggatgggtgtgaatgccaggcaatggggaaagcctggggcctaggggacctggggaggcagcaggagacgggggagatcctggaggaggcacagggccagacagggcatgggtggcagaggctgggctgagggcactggggaaagggtggctgaaggagcctgggaagcaggtgaggctgaagaatgagagataaggacgggaggggggaatgcagactggggactaccaggaaatgagtttttgggactggccaaaggaaatagaatttttccatttgagagtagaaggcccaagaaggccacccctaactctagtgattcttcccaaggacccctgagctcagctctcagggaagcaggccctacttgggcaaacttggggagctcccagcggaaaaggcagaaagccaagtgctaaaaatgccaagtgctgaaactggaagagcccagcccaaaccctgggaggccaaacagacacgtggtgaaatccagtgagtctacccacaagctccccgaagccctgcccaggccagagctatccccaaggcctgtgggaaggagggaatgctgtcccttggctctagcctccctggactcatctctacacactgggcccatggtcaggagatcatccgaagacctggaccctgggctcctcctcaccaccagtgctgcatgggtgtgttagagagaggggcctcgtggcctgtgatgagtgcgaggatcgcctcccaggggcatcccagagagagggcgatcagagcagccaatgtcactggcatcccagccctccccaacataccccttgggttcgtggctttttcttcctgattcagcagcttcagaaacctccagctcagcatatctacttcctgagtgggtaaggaacaggagggggcttaggggaactggcagcctccctgagcgttcgttatgcaaacgaaggaaatgagccctanaaatgaaactgagaagcccaaggcgcacagtgagagtcaccaccctctgggaactcaggtaggccagtttgtatcccctttcccagcccagccacctgccccaggacactgaatcctacctaccttctagcctgaatctgtctctcagcaacccaactttaccagtcagctgttcaggcagcaagaattttgagcacctacagaaggtgagcaatgtgaacagggtaaaactaggcttcttcaaggagcagtggttcacaggcctgggtaccaaatcctaagcctccccagcccatatcactgaccttctacctgaaaggaagttcttccttagatctaactgcagttcctcctgctgtagaaagtttccactggactataggcttctctgttttttgttgttgtcgttgttgttttgttttgagccagagtcttgctctgtcgcccaggctggagtgcagtggcacgatcccagctcactgcaacctccgcctcccaggttcaagtgattctcctacctcagcctcccgagtagctgcgactacaggcgcccaccaccacgcctggctaattttttgtattttagtagagacggagtttcaccgtgttgcccaggctggtgtcaaactgctgagctcaggcaatccgtccgcctcggcctcccaaagtgctgggattataggtgtgtgccacgacacccgacccaactttaggcttcttaaggtgcctctgtattcccagtgcctctctgtttctggtacacagtagactttataaatgtttgctgaattagtggtccttgttccatccccagcctgccctaacccctgccccacccacacatgaattcaatgaactaatacctttaagcccttaaacagagttacatattcgcttgctaaataatacagaaatcagttacagccccttctagaacctgtagtcccccgcctcctgcctgagcagtcacaccacattattctgtctcctgtacttcctgggcatttccagggtcatcaaaaagcccagtgtattgccgaagggactaaggttagatctcaggaaggacttcctagagaatagccaaggggagtctggtcatcctgggagagctggccagtggagcaggcgctggggtcagtggggtaggtctgagatttggggacagtgagtagtgggagaggcgaggtctggagcaaaatggagccagggtgccacctagtggttccctcacctccccagccccagaagctcttccttctgggcctgggttcttttccctcctccacacccttccctaaagaaggcaataacttttgagtgcccaaaacaggagaggcatttttcttgcgttgcttttatttaatcacttccccagcccttccatcgccttttttgaggataagaaacccaaagttcccagagattaacttgcccaagatcacttggcctggatttgagcctgaggctcagactccaaaacccacactcaatttgctacatctcccaggggtggggccaaggcagctgtgagcaaaaggagaagtatcagcttctcaagggcctagggtttgttggaagggcaaggcaagggcaaagggggatacagaacaagggggcaagtaccagtgcctgggatggacccatccattcaggcagggggtgtggggtgtcccctgtgcttagaaaccacctagcatcatagctgcaacagcactttattgggatctgagtctacagttcacatagggaggtgaagccgtgggagaagcaggggtaaaaaaaaaaaggggggggacttcaccccctagggacagctgcttccaaacctaacaaaaccccagggtaagtcctcgtgctgggcctcgagccagcaactctagtcaaatcccaaggcaccggtcagcatgtgggtcaaggggcccactatggggacatacactcaagaggatgaaagctctttagcttcagaatcagattgccttccccagaccccaccccaaaacaggctcctctcccatctcccccttcacagtgacaaaacacaagcccacatcccagggcctggagtatttgcatgcatttgcatagacggcaacgcaggtccagctaaggcctttttctacataaagtgacatcagtgcagggctggtgattttgctctactgtgtgaaagatatctgaggacaccaaacaagccaggacagagtccaccctccaggagttagataacgctgggatcttgggctgggcaggccaaggccattccctgtggggcagggtgtcagccccggtggtggtggtggtggctatggctgtgcccctccctgggccccgcagctcttgggctctgtgagtgcttgtccttcttccctgacctgtggggaggaagaggcctttaggggacaataccatgcaatgaaaacgggttccccaaggagagaggaccctgctcctcccaatgaagctgacttgagcaggcaccaccaagcatatgtgggaaaaacctggtctcccaggataaaggctccagtcggggagacaggaagatggggatctccctcgtcccctgggccatgcaggtagaggtagggcagggcaactcaggagaaagaatccccctgcccaaaaggggactgctcaggaccactctggggtgggcacaggcagcttcctaccctcaagggaagaaaggaagcggacctgaatgccttctctaagggaagccagctggggaccaaaagtaaggatactcaaactaatgatccttgctcttcacatcctcccgactgcctctgtcccacccgacccaactcccccacagctgcccacctcttcttcagtgctttgtctccaaagaagtggctgaagatgaagtcctcaaagtcatctacttcatcatcatcacctgtctgttgcacagccacctcctccaagctgtcctccagggcatccacaaaatcccggaagcggaggcggtcatgacggaagatgccatcctcaccaaagaaagcaggtgagaggggtagctccttggtcagctgcccagcccagggcagccgtgccaagtatgttcttagcagagaggccagctcctgttgccgcactggggctagctctgtgccaaagaaagtcaggccctcctgccgggcacactcgtccacacctgagcagccctggggtgcccggtacttgggcctcaacagctctgcccaggatggcagggggtcatggctgtccttagtcccttccctccaccgaggttgcttctgcttttctccagaggagtggaagctaccacttttccttgggggttccttcgggccctgtcgcttgccctccttcttgctccccgactcctccacccttggcctgccctccttccaccttcctgctggctccctgtcctcctgacctccccagttcttcttcctttcccggccagattcttccttcttatgtttccagtgctcagccttccggtctctctgcccatcccaccacttttcctttccactccactccctagaattctggaagtgggacttctggtgccaggcctttgaggcattggcagagaccccagggtcctggccccagttctccaggccctgcagtttctgggccaatctgtggcccagctcagccaagccagcatgagctgggtccccgcggctggcatcctgcaagctcctctccagatcctgctgtacagaccccagcagccgtcgctgcctctctaactcttgccttaatgcctgtgcctcagcctccagctgttccttctgcttcaggaagctgagttctggctcctgctccctggggccttgctccctgatggccttgtcaccctgtgggcctctacccccactgaggcacaccccatctgggccccggacacagtcggcctccagcccctggagccgggcccgcagctgctgcagctctgactccagagcccgctggaaggcttcgccctgctgcagagccccccggagctgggcattctcctcctctagccctttgggctggtgcatcaggctctgaagctcttccttttgggcctagaatatggtttgggacaaaggaagtcacaaagagttcttgtcaggatagccccaatgccttctaccccaattccattctattatagtgggcaggtggcctgagcccgttttacagcctggaacacccagaggatttggttttcatcctccaccccatctccatcatgaatgagacacagggatccccaaattccatcctgagcctcggcatctacatctttatataagcacacacttcctagattcacctaaggatagccaatgtgtggctctcacagtcttatttcctggaacagtgttaactgatcatggcacctggcatgttctttaaatccttttccacacagtgctccaggcagaccacaccaatcaatcacaggtgataccatgtatgtttcatgtaccatgtggaacaggtatgccagccctggcccaaaccttagcacaagggatgtgaaccaagaactgggaagacgccctgactatagtgggagaggggagggtcaggatgtgtgggtaaataggaaacattccttttgggggaggatgctaggacagacgcctggcctaggtgggttaccctagcccagcccctcctgcctgtgcccacctgcagctgggcctgcagcagccggatgtcctggttctccttggccagcttgtccagcagaagacccatgttttgcaggctggggacactgtcaggaggcactggggcctgcagctgttcccttagcccatcctgagggcagaagagcctgttatgccatgctaccccacagcccaggttctccccagccaggccccacctgcctctggagacattcacacatacctgcctgtcccccacagcttccagcacctcggggtctgggaggacctgccgctccacttcctccatgggccctgtgggaaagggaaaccctgaaactggtcctgaggcacacagagcccattctccccacaccttcccattcacacagccaccactcctgctcaggacccaccctgtggctgagcggtttggtgagataaagggccaaggggcaccctgaacagctgacaaggccactaactgagaaataaatgtgagcccccagcacccctactcctgacccacagaaccagagaacacatacaactccccagcacaagacaggctcctccctactcaccagtctcagactctgagaggccacctaaggacagagacagaggagtctgatgaggcctcggggaggggtgatgtgaggtaaggtgagaacatggcaggaaggcaggcaggcatggaagcccaaagccccagcctcagaggtaccactcacctgagaagaggaggacccccaggccaagcagaaccagggccccaaggaggcacatgttgagggagatgcccagctccccgcctgcaccctcacccccagcctggttctccacagccaggggcaccatgggctgaggtgggccggcctcccgccccgccgtctccgcagaccctccatgtccacgtcggtgtcatcgtcactgctggagcagcggccctcctccctgatccaagctaggggaaaggacagggacagggcagtgaggtgactggagagatggggagacacagggagagaggggaatcagaggaaggcacagggagggaggtcgtcagccctgaccccagagaggggcacatgaagaccttgcccacttgcccacttctgcctgggcattgatgactgtccctgcccagtctggaggcaggagaccagtgctgtcaatctacgagctataaaagccattttcatcctgaaagcatcctccttcctcagtgtgcgctgtgcatcaaacttctgcagctattaccaccctcctgggttgcctccaaactctctggccactccttcccattctccctccctggctcttccctgatcctaaagtcagtggtctccctggcaccatttcaggttctctgctcttctcactgtacacatagtcacaattctctgacccacaccactgacaccccccttcagcaatgagtccttagtgtgtaactcctcacttggcctcccagagctccaagcctgtatgtctgactgcctgctggccactccctctgggaccaaacattcaacacactgctctgcaaactggttcttttctggtgtttccccaattcaggggaaggcactgcttccaccatctagctaacctaagccctccctctccacctcacatccagacagtttcacagttctacacttaaacatcttgacagtccacccctgttcacaacccacactgtacctgccttagttcaggtctgcatcttctttcttttttttttaatatttatttatttttatttatttttattttttgagacagggtctggctctgtcgtccaggctggagtgcagtggcacgatcacaactcactgtaacctccacctcccaggctcaagcgatcctcccacctcagcctcctgagtagctgagactataggcatgcatcattacacccggctaatttgtgtgtgtgtgtgtgtatttttttgtaaagacggggttttgccatgtttcccaggctggtctcaaactcctgagctcaagtgatccacctgcctggaacacccagaggatttggttttcatcctccaccccatctccatcatgaatgagacacagggatccccaaattccatcctgagcctcggcatctacatctttatataagcacacacttcctagattcacctaaggatagccaatgtgtggctctcacagtcttgtttccacctcccatacctggaacagtgttaactgatcatggcacctggcatgttctttaaatccttttccacacagtgctccaggcagaccacaccaatcaatcacaggtgataccatgtatgtttcatgtaccatgtggaacaggtatgccagccctggcccaaaccttagcacaagggatgtgaaccaagaactgggaagacgccctgactatagtgggagaggggagggtcaggatgtgtgggtaaataggaaacattccttttgggggaggatgctaggacagacgcctggcctaggtgggttaccctagcccagcccctcctgcctgtgcctcccaaagtgtgaggattacaggtgtgagccaccacacccagcctatttttatttttatttattttattttattttattttattttatttatttttattttttgaggcagagtctacctctgtaacccaggctggagtgcagtggcacaatcttggctcactgcaacctccgcctcccaggttcaagcgattctcctgcctcagcttcccaggtagctgggaagtagctgggactacaggcgtgcaccaccacaccgagctaatttttgtatttttaatagagacggggtttcaccatgttgcccaggctggtctcaaacttctgacctcaggtgatccacccaccttggcctctcaaagtgctgggactacaggcgtgagccactgcaccctgccgcctatttttatttcctttagagacagggtctccctctgttgcccaggctagagtgaagtgggatgaccatggctcactgcagtcttgaattcctgggctcaagcaatcctcctacctcagcctcccaaagtgctgggattataggcacgagccaccatgcctggcccaggtctgcatcatctttgcctgaccactgcagttgcctcctaaatggcccccaggccctccatcctgtcactcaacagggaccaattcctacactcctctgccacaagcctggaacagagctccttagcacaagacaggtggtccccactcctttgctgatgctgcagccttggcctaaaacattctcttttccctgccctacgtaccaaaagcctactctgtgctcagggctccactcaaatgtcacctctcactgtcccagcctctcccttgccctcaaccagtcccctgactgaatggcctctccttcctttgggagtaccttaattacagttctgtaccactcttaggtctgatatgcaccttggctcagtctgatctgccgcttacataggcggtaaccaaccatcttccctctgcccaggcccagggccagcacaaggaagggactccagaaatgagggttgaattctggaagcaagaaaagaggaggtccccatggcagagaggaaagagtcaaccagatgtgggccctgccccttaccagcagtgtgaccttggtcaagtcattcaacctttctgggcctcaacgtcccaggggtagtggtgagaaaggagagcaccaagctgctcagccctagggcctggaccacagcatgtgctcagtagtgatggctgatccctctcccataccttctagaaggagagtgacaggagaggcaaggaagactctcacctgctttgggggttgaaggcaggctctgtggagggctctggccttccaggtcctgtgtgtctggtcccaggcctgtcaccacggtggtctcctgcaggtctccctggactactgtgtctcctgggccaggaggctccacaccacaaacatcaccttccagggtgccctaatgcagatgcagcagtgagcagctgctagccctccccgcctcccttccttcccacagcaaatctcctcaccttgacctcagtctcctctgttagaatgctgccagactgagggctttcagtctggaagagcgtccctgcggtaggagaaaaggcgcagaaaaacccactgccccagctgaatttcctttgcagccctctgtccatcccacgggcccctaccaggttggaagaggcaggaaaaagccaggatggaatgagaaaaggagtttgtcaactgagattaatggaggaactaaaacgaaccagcctccctttctctgaggaaactgagaaaccccaaaatatggagaatagctttgtccggtaagctatgtcctaagcagggcccagtaccttctccatccatggtcccagctaattctttcccatctgtcttggaggggctgtgaggggcctgcagggctctctcagattctgggtccatcctggatgccgggcccagtgtctccactggcaggctctgggaggagaagtgcaaggagaagggctgcacccaagaatggggccccagcccacatcccagaaacacacacattcagtcatgagctggcccaaaaaggggctcggggcagcaccaagtgctcggcattccccagcctcactcactgcgaggaggaactttcaggggccaggtttccgctacacagcgccgcaccaccagaccaaggcactggttgcagtacaaacctggtgccccgcctccagaaggtgagctagagcctacgtttccctcccatcaagatcagcagcacttccttccccacagatgaacaacccagatattataatattaagggtgggaagaaggcaagagaacaaagtcccctgggtgcccacgggtcacagttatgcctcccagggtgtccctgcagctgccctctcaactggacaactacttacatctctcaagcctttctggcctttcccgctggcccctgacactcccccgacacccgtctcccagcagctgctcacagaagcccaacccaccccaaccacagacagcctgtctccagggcactctcagcctggacatccagccctggccacacagcctcgtgctcctccctctgcctactccccttccatagggccctggcctgccacccgccccgtggctccaactatccctctgagagtaatgcttcaccttagttatgtctttgctattttcaaaacatttttattctcatggtcccccctacaaggcaaaaatcatgacgcccgttttacaggagaggacagagaggtgaaatggcatgcccaaggtcccccagctgtcaacaaagacacctcaacaggaggccagggctctgagagcctggtgcccgtctgctcatacctgccttccctctgccagtgagccccagtccattatcttgctccagcgtcatccccaaggtcaactccttactcccagctgggttcctcaagggcacctcaaactcaacatgttgaaactgagcttctctcctcctcccctcctggtggctctaatatacaaagtcgctacgtcttggaactctcagagatgcctttgacaaatttttgccatcccttctctagccactcagttccccatcctgccaacccccttctccctcctcagtgggcttctgccccaccagctgctacctggactgctgcagggggtctttgaaacactctctccctgttcccacccagcatgcacagtggcttcaccctctgcctgagacaatgattgtcctgatccctctaacccaaagccccacactgatttcccatcaggatgaggcctgaaggcctcagccaggctcttccggtctcttccaggggttcccaggctctgtccccaacctcactccaacactggctccaacccacgtctccacatcacccatgggtgtcccacagtctcccccagcatggcgttccccactatcgcctcaggacctttgttcacattggtctctccattcgaaatccatccctacttgtctcagcttacccaactggtcccttccttcatggcatggtccaagtgccaacacctgacccctggggcctgatctacttcttcctgctactggaattcctctaacagccagcaggaagtgatgtaggtgaccatcaggactaaggaaaaggacccaccaagaaagaagcccagcactgcagaaacaccccccaaccccacccccatggttcccaggcccgctcttcctacctcggagccagcaagcacccagctattatcagagtctgggcaggaggccatagttgctgaggtccctgaggctgctgtggctgccacctgcagaagaaagctctcttaaggatgggagctcccttcaggaggggcagaatgcagaaagcagccttggctgggttccaaggttcaagtgctgggcagcagcctccagaaccaagcctggttccagtccttctctccctgacaccccagctcttctaagcagtatttgccttgcaaatcagaatctgccaacacccacagagaagccagcctcttccagggaccaacagggccttggaaaactgaactgaccttgaaaggtcaaagtagcataggctggaaaggctctggggaattccagtccagccccctgacatttgagtcagggaagatgaagcccagcaaggttgacagactcaacttgccaataagaagacttgttaataagaagagcagggaaacaacacagccctcccttcacaacaccaggtacctacacaatcactaccttctcccccaggacctggaagggaagactcaatggcctccttcagccctaagtgtcccaccacttgcccagcataagtccttggtatggtctagttcagtggttctcaatcttggctgcacattggaatcacctaagattttgattcaattgagttggggggtaggcccggctgtgggtcttttaaaaaaccactcaaatgattctcatgcgcagccagggttaagagccactggcatagcttagatccacctggatgcaccttttataagtctcctcatcactctcagtcttcatcctaaattctgtttaccttcttagtaatcgccagagtttggtcttagggaacttgaaggtgactgggaaaatggatttatggcaactatcatgtatatatacatcactttatagcttgcaaaaaatagacaaaaatcagggctatggtcctgcacccggttaatctgctctgacttgacagggataggggagggaatcactccagtttccaaagcctgactgacacaaagcagggtaagaagagagggatccgccccttcatccaaggctaaaacagttccctcaggcagctcctgttgggaccaggcataaaggtggaaggatagatgagctgacctctcaagagtactggattgtgatccctcagaacaggataaatgactgcttcccgagcactttataagaaaactcaggaaaagggaagtgaggctgggagagtatggcagttctacctttgaaaccaaccacattatccccttctgtttgagctgttttcaagtcctgcgtggtgccctaagtaacctcctgtggctcctgccagtcaagatccaagtcctggataggtctttcccaatgcccatcctcccagacacatgcacccattccacacggagacaggagaatggctgcaatgacctccctgtaccaaatccaacaggacaccctggcatgcatctgtaagtatccatagagccatggctgttcagccttccgcttgtggctccacccccgcccttgttatcatctccccatccccagttgctgactgttaacaggtggtggcaggaaggaagtggcagcagcttgggctgaagtccctgtttatccctagctgtgtgtgcagcctgctcaggtcctctagaaccaggcaccatggcaaccacagtgatgtcagacccactgtctccatggaaaccagcaaaggtatttgggtcaacaaaacaaatacttatgagacccaaataggagacactctgaaactcctatactctgggttccaaaccctgatacctctttcttggttaggttaacccagggttcaaaaaaacacctcttctcccaagccagcatctcactgccttattaggaagttccttctgctgtctaatctccacccttccctgctgtgtttccagatctttttcttttcatcgaccttctggaagaaaacccacctccactccctccctccacccccttcttttcattcaggcaggattcaacaaacacctcctgtaaggattatgacagagacttctgctatttctaaaaaacagctaaagggggagctctcccactcagcataaagctaggaagtctcgcctctagttaatttaaactcctctaacagttgctcctccaaaccgctaaagcaaaggatctagggccacttgcctggggtacccagagcaagttcctgttgtgttagcgtcggcacctggccttcctcccccagcccagaaatgaaaagcagctcattccttctagattagttccgccttcccttttccttattccacccccttcaaagcgaatctgtggaccccttcccagctaaggcattacctgaaccagctcttgcttcggtcttcagcttaacttgttgcaggcttccctttgtttgcagcccgagaagaaaatc

SEQ ID NO: 1715 - DNA, 12493 bp, Homo sapiens
cggcccacaccagctcaccgaggggcggcagcgcgcggcccggctgccggaccgtaccatcccgggcggtggagccgccgaggaggggcgcgcgcgaccgaaggcgcacccgggaggcccaggtagcccgggggccggtgctggggcgccggcaggccgttcccgcctcgacccacccggagccagccccctctgcggacacgacatcccatggggacggtggcgcgaaacgccccactctgccgcacccaaactctgcagacccccagcttccctgggcggccgcgacctcccgcctccccgtctgccgctgagggcccgcggcgtacacaataggcttcccagaagggttaagaggcagaggtagaagaaatacggactttaatgaagagttttccctttggtataagtgagacccgtggaaacatccaaacagcaaaaggaggccaggatgaaaacggtcaactctcccttatccacaaggccaaaagagggggggccggcttgctgtggtgtgccaccccgggcctaggctggccgggcctgtagaaggtactcaggaactgcaggttttgcgtttcccctccatgaaactgacaggcattcgggctgacttctgcctctcagtctcgcggtaagagacccaagtttttctagtcctagatggaaataaatttcatctgcctcaggtctctggtataaaaggtgcgatcccagttacctcacaggcctaggcgaggaaaatgccaagagctgtaaaagggcttggaaaagtcaaaaaggtgatgtataaatgtaataattgattatcattttgtgctcaagaataagcaatggaaaagaaaataggaaagtaagtctacagccctaaaatatatgcatataaaactttaaaagaatgcagttccaactctacagatggtatgtggggattgtctactgctttatagtctcaatgccccttttctcacctccacaaaatccacctgggagagttaactgtacaagaggcccaaattcagtcacccccaccccgccctcccagaaagggaggcagggcagaggcttcaggaggaagggctgcactttggcgtagagtacataggcatgcaacatgggagggcaggccttatgaaatgtatatacagaccccttggggtgaggggccccggccaggaggcactgagcaagggaggggtccatctcccgcctggccgggagtggggctctggggcaatctctaagggttgcatatccccagggagaggggacagctgccactcctgcctctgttatcccaacccaaaccggagagggtgctcagcaagaacacaggtcccagaagccaagaaggtgttggcatccctgtcattgaattcaggggtccaagaactgtttgcataaaatatcattagacctaagagatggtcaaaggcacaaagtttaaacatggggggggcgggtgttgagaggggtctgggataccctgaagcccagaggtgtgatttgttcccccttgcccagaagggtgactgttccactgggcctgtcaccacaggacattttccatgacaagcactcaccttcttggggaaggggcatcaggttggcacaggaaaggcccaggtgaggggccactctgtacattaatactttggtgattaatgtttggggagaggcaggattctcacccaggcttttgactcaaaccctctcactcagctggatatgaaacccagagtccatgctactcccagctctgacacaaggccaagcccacagaacactcccaaacgaggtcccgagagttagggaatagggtggaaaggattggagggcatcttctggaagagagcgctagggcagatcacagtttccgctccacaggttgctgtagacacagttcgctgcccgcagagatgatgggcaagtgattgtccatgtggtagctgataaggtgactgacactttcaaagcggtgatccttagtccgaacctgggagggtgggaaggaagaaggtcaattcaggtgaagagtcaaataagacctcagcctccaaggtggaagagggtgaaacagacaagaggcttgaaggaggagaaaaaaatggtgggggagagtgtggcctgtcaatcctgatcattgaggcttctctagaaagagacagttgtaggaatagacaggtcagtgaagtgagaaaaggcaaaggcgacatcagccctgaaagagtgaagctgagagctatatacccctttcttgacctggaggaagttggcatgtctcagaagagtatacacagtgcaaaaaaagatgtggaggctgggcatggtggtccgtgcctgtaatcccagcactctgggaggccgagggaggcggatcacttgagcccgggagttcaagaacagcttgggcaacatggcgaaaccccatctctaccaaaaaaaaaatacaaaaattagccaggtgtgccaccacaccgcagcctgagtgacaaagcaaaaccctatctcaaaaaaaaagaaaggaagctgagattactgtagaaaacaaacaaaagtttttttgtttccagacagggtctctgtcacccaggctagagtacagtggcgcaatcatggctcactgtaacctcgaactcctgggctcaagcgatcctcaggcctcagcctcctgggtaggtaggactacaggcatgtgtcaccattcctgactagagacaaggtctcgctatgttgcccaggctggtcttgaactcctggcctcaagcaatcctcccacctcagcttcgcaaaatgttgggattacaggcatgaaccaccacacctggctaaacaaggaaagttttgaagaacagtgaggcagtgcagataagagaaagcacagtggtctgagtcctgagtctggggagctggagaagcccttggatcttcttacaaaaggaaacttgcagtgtctagcctctaaccatctgacattgggcatcacaacctcttcagggtggtttccttatttgtcaaaagaggggcacagatgagatgactgccttctagctctgataagcttaaggcttggggatttgaggacgggccaggactgtatttgttttgttttgttttttcagacagagtctcactctgtcacccaggctggagtgcagtggtgtgatctcagctcattgcaacctctgcatcccagattcaagcaattctcctgcctcagcctcctgagtagctgggactacaggtgcctgccaccacacccggctaatttttgtatttttagtagagacagggtttcaccatattggtcaggctggtctcgaactcctgacctcaggtgattcacctgcctcagcctcccaaagcgctgggattacaggtgtgagccaccacgcctggccctgtgccaggactataaagaacatagttcaggctaagggatgagcctctggaggaagatgccagacactttaaagagcaagagaggcccatagacagctgcccagcgggaatgtctacaaagcaatgagggaaggaagagggatacactgtagggtactgtaccttcctttttgccacccctcacccacacctctgccacactcaccacaccctcagggtccaccagtagcaaatgcttaggctgcccactctgcaagccagtgagcacatactggccaggtgtggtcgtgctctcccgtaccaggaagtccccattgagctgcagcagtgcctcagcctcccgccggctcagcttcccatggaaccagggctcccctcggagctgctcagccatggacaccgactggggaggtggaggcacgcgaagagcatcttcgaagggctctggaagtatagagggagggtgaggggaagtagcaggcacaacacacacccaagacccagacttcagggaagggaagtcaggaaggaaagagcagataggcaggagaagggccagaaccaagtagaaaggtggggatgcagagaggagagagacgagcactcactcatgtcaaacaggtcccggggtgcactgccattgatagcaggattggggggcccagcaccacccactgcttgccgggccttgtctaggttctggacgttgacataggagggatcatcaaaaagctctctgcctgctgaggaaagggaggctctacagtgatcccagccctgcctccaacactccccagctctgcctatctcggctcccttcatacctggacagggtggtggaggtggcatctgtttgcggacttctggatctcccccaacaggctgtcctacaggctgcagggataaaaataaggtgagaccagaagccctaaccaaccactcccaccctagccccagcccgcctccatccaagcaacttaccaatgtagctcccaagtggctgggggtctgggcattgggtgcagtgggtcgagcagcccctggagcggctccttcccgaagcctcatgtctaccaccccccccaaggtgttccttccccgggaagtcattatagtactgatggtcaggtggctcttcctcctcctcatcccatgctgagccatcaaagccagccatcctgagggacaggacagtgaagctgtggctgtaaatgtgtggtgggcaggaggagggaaggacagaatagaacagcagccatctattgggtatttactatggattaagcctgaggctgagtgttttatatacataatcatttcattctcctggcaaccccgtaaggtaggtattgtttccttccccacttttacagatgaggaaaatgagggtcagaggtgaaaagatctgcccaaggtctcacaactaaaaggcggccgagctcagatttaaattcaggtttgactttaaagctcatccccttggccaggtgcaatggctcacgcctataatcccaacactttcagaggccaaggagggagggttgtttgagcctaggagttcaagaccagccaggacaacatagcgagaccttatctctaccagaataaaaatactactactcagccaggtgtggtggcatgcacctgtagccccagctactcaggaggctaaggtgggaggatcactcaagcccaggatatggaggctacagtgagctgtgattgtaccactgaactccagcctgggctacagagcaagactgtctcaaataagtaatgctcttgctcttgatctctgtgctatctcccaacaaggaagggaagcaccatgtaggggggtggggggccgggggaggcactccagctccagaatattttaacctctcctaaatattcaatccctactggctccactgcttatccctcaaggcctgaggtgggaaaggttgtaatctcagggaaaagagatatcctcccaaacccaaattcttgatggcttctagaggcaggaaaacacataatgccaagcagagaaatgagcaagaaagagggatgggagtagaaaatcccacctagccagagagagatgtaacttggaggccccggactacaactccaccatgagcaaacaagaaaagctggtcctgcggcaagcagggcctcaaaagtctttcctcctgggccacaggaaacagaagaatagcaggaagtgggaagcagaggcacacaggttattccctccctgaacctctcaactcaagtgtaggaagagcagccctcctttcctaatcctaatccaagagctgctccacactctccccacctgctcacctgtcatgaggggtgaccagtttgggtgggttcctgaggtattgtttgaagcgcaactcgaaggcctggccaatggtgctgatgacatcctgggcaagcccttcgggacactccagaatgtggcaggctgagggcacagcagaggctgtcagtgagctgagcccactgggaggaggcacagacaggggccctcatcttcctctgcaggaacccccactgagatctacttagagtgggtacagatgaccaaaggtcctactcacctcctcaaacagccagacccacccagtgctccccaccatgcctcacctctctgattcacagggtctttggcaacataggcgacatactcggctgtgtcctggggaggaaggtcaaaaaattttacagttctactttactcctgacccctaaaacccagtccttttcagatatccccacaatcctagcacccccacttctctaatcaatgtcttcccaatccctagccccttgctcttctcccaccgcctttgctctgttccccaactcaccggatccccgccggatgcaaatgagatagattgcatgtggtggttggcgatgatctgagaattagggcaggggatgaagaaggaagggaatgccatgtgtcaggcagcctcagggcccagaaccctggtgccccagtctcattctctgggttccttatcccatatcctcatttcctccttccctactggtctcctgctctcaagccctcttcctagattttggcctcctaactagatctccccttagcacccccatcagtgtttctggtccgtctgcccaccttcaccaacctgtttgcagtctgcggccatgaggttgaggctgctggtggagacggtgagagtgattggcattccagcaaatttcaggttactcctccccaggatagagctgagcgggcggctacagggctaaggtagggcccagggtctcagaaggtgagggttcccagcacaggcaaaccacacttttgcctcctggccctctccccacatgccccacacttgcctccccactgcccctccacatttcccagcagcatccctatccccaaggaccccaagtacctttctcctccttgtcgcccccttagcacccggcacagcctcacacaccagactgatggcctccctggggaaagaggggtactcagacccagcgcctgcctgcctgcctcccactcaactggggctgccacagggctgggggaggggaaagccaggccagactcccagggcactccaggctctttgtcatggtggattgaattaagggcctttaatatttgatgacactgagaggccacttcctggctgattgggttagggcctcaatgggtatagccccacccccttccagctaccaaatgtcccattcccttcccaaaggcagcagcaaccttccatctaccccccttttctactccagctccacctgccagctgcttctgccaccttccccacaactcccaaggctggataggtaaggaggatccgggccaaaggggcctcctttcagtaagaggcggaatcactacctcagctttctctcaatcccctttactacgcaaagatcagcccccagcagcagcacccaagtgacccactcccctcctctgtttcccatggcctcactaatcccaggactcccacaatccactccctccccactaacctggtgacctgagtccgggtgttgaagtccagggcacgcattgactggaggacctccacacaacccatgtactaaggggagggagaagaggacagcaggtcagcggctcccccaccccagccccttcacaaagggccctaggactttacccatatggtccctaagggaagtaaagaggaagaagttctgcccacttcccgtggctacatcccacaaccaaggtgaaagacaacagggaatgaggagaaaaagaaaaggcaggctagaaggacctcacacactggggagagagtttggaggggaccgacaggcattggctgggatggagtgacaactccagaaagcgggaggagaatggaggaaagatcaagaagtcattcattccaacacttattaagagcttctgccatgctgggcattgtgctaagcatgccagggtgggggtgggggagtgaaaagaaggaagggggcccaggcaaagctggaagggaaggggctacagaatcggggaagggatgagaaaggtttaggaaataggacactgaaacggggttgttggggaacagcaggaaaaaagagattccggccaagctggagtgagcattagaactggagggggtctgcgggggaatggagaggaggatgttcactcacccgaaccaagtaggaaaccccgggtcccatgactttgtcgttgggatgcagccagccccgcgtgggcttattgacaaagctcccgtggcgggtccactcctcgcccccaagctggcccccttccacccgagtcctgcgcccgccgcctccactcagcttgttcatgtcctggaggaggggtagggggcctgagtctggcatggctgcccctacgatcccctccccatcatcagctgcccttcctggctcccccttagaccctgggcgccccccagccgggttggccagcctcaggttgctcatccgggggaagaaggagcacagggtagtgggactatcgtccccaggcagaggaggcaggatgggccccagggatgaagctgatggggaaggcagctcctccgggggggtggacccagaagccccttcctccagcgatgacagagactcattccggagtggattgtacttgggcttggggggcaggagatccatagttgaggtgaaagaggggctgctgcccagcctggcccccctgccagtttgggcaagggggccaggcagggggtatccccaggcccttagcctggttggacctctgtggcccaggagtcacagaagtcctggggagggagagggacaagtggcttccgctccccagctcagacccagacagtttcaggccccatccccgcccaacgtggagcctcttctctggctgagaagagaacaggctggacccagcgcttctggctcctccccaggggcggggagctaaggggagagaccaatcgtgaggacagtgctgactcacaggctcagaggggctgagcccccaccccgccccaacctcgaactggagcagggggtagggctatccaagcccctctcccctgccctatacaaacaactagtaatctggggagaagtaaagtgggggtgggagggaaggatggaagagtgggacggaaaggaaggagataggaggtctgggtcactcaaaaccggacacacgcaggccaaagggggcaggaagccaggcaggagtacaggggaatgagggaggaaacagaggcagctgggggtggaaaagggaggagatctcagagctcagcatttcccttcctgtcctggttggacactcgaattcccccaccctctctatgcccgaaagctggctggccccagcccaggccacccccaaccgctaccccatacagtaagcctgggccattagcatcctctgctacagcagctgtggactggagctagcgaagtggggatgggaagtaagtggtcccaatggatgcagagcagggccaagaggaagagcaaagctggtgaaaaaaggggaataaagttcaacctggatgatacatcaggaagctaccaggcaagaagggaacaagaggacatgctggtcacggcttgttctctacgtatgccatctaccacaccaagaccgatggctcatagccaagcactgtcctgtctcccctttccacagggcttgttaacacagcacactgtcaagggtgagaatgaggcaatcaggtccccactcccactccaaaccaccccaattcacatccctcctcttacagggccctaagccccaccaaagagcacagcatccttcacaccagggaaggagcctggctggaggaggtggaagaaacagttctccaagagaagtagaaactacaggccaggaagggacagagagatcagaagacacatctgcgtcaataaggacaggagaaaaataagtacaggagaaaggggtgtcaggagaagatgggttgaagctggacacagggaacagtcccaaacccattcctgccacccacggcttcctgccactgctcttccggagaatgccacaggcaaagctggaaagtgaccaaaaaaaaaaaaacaaagatacgtattcctaccgggcgcggtggctcacacctgtgataccagcactttgggaggctgaggcgggtggatcacctgaagtcaggagttcgagaccagcctggtcaacatggtgaaaccctgtctctactaaaaatacaaaaattagctgggcgtggtggcgggcacctgtaatcccagctcaggaggctgaggcaggagaatcgctcgaacccaggaggcggaggttgcagtgagccgagatcgagccattgcactccagcctaggtgacaagagcaaaactccgtctcaaaaaaaaaaaaatacgtattccccccagctcaccttggaattacccttagatttacttcagagaattaaaatatagatagataattatcctgattaacaacattaacacttgaagtgtgttagatgctgtgcttaactcttacatctccccttagtgctcattccagaagagctttgtcactctgccagccaatcctgagaaggaattttatcacttcatttccagccagctctcgggcatagagagaatgaggaaaggattccaccatagcctcacacccccaaaacacacaaacacacactaggatgtccctcatctgtagagatgatgttctgtgggagcctacagtatccagagccagggaaggaccaacgggtgtgggcgttcggaagaaaagaaagacgtatgactcttgaaatttacatagggagaaaggagattgcctactggaagtccaggtgattgggtgtaggggaaaagctgtgtgtggcttcgcagcccaactgggaggaggggacaggggcgggaagtggcaggaaatggcgaaagcctcaggaatgtttccagcagggaaggctgggcaaacggggccaggaggaatgcccagacaagaactctggttagggggaggggaagagacagagaagtagcgactgaactgtcccttaaaaaaaaaaaaatcaaacaacaaaaagagcactattatctacccccactccaaactaccgttcttctggtagtagaaaacttttgctcatgtcacacccacatgccacacaccaacaaatccatggtcttatccacttatgtctaggaaggcctagagctacttctgggatgaggttggtcctgggaagggaaagccaggaagtgaggctgggagtctgagggcaagtctctctctccctctcgtgccaaaccccacgttcagccctttcaaatagttctacccttggaggaggttaagaaagaggaaaacggggacgggcgcagtggctaacgcctgtaatcctaacacttaaggaggctgataagggtggagcacctgaggtcaggagttcgaggctagcctagccaacatggggaaaccccgtctctactaaaaatacaaaaattagccgggcgtggtggtgggcgcctgtaatcccagctactcaggaggctgaggcaggagaatcacttgaactcaggaggcggaggttgcagtgagccgagatcgcaccattgcactccagcctggacgataagagcgaaactccgtcttaaaaaaaaaaaaaaaaaaaaaaaagatagaaaggaaaacggaaaacggctgcctttaatctcactccttacagccagagatgggaactttgacttcccacctgggggagcacgagagtgctcggaaaactgatcccaaggcccaaaaagagaaaggacaggaaaatataagcaggtggagtttcagggattgacgacaaggcttttcagctgatgacccaggtcccacaaagataaagctcctaagggggcgtggtcccctaaggacgcgaacttcagacttctgggcggggaggctttctggacagtcagacgtggattacggagggggcgtggcttcggaggggcggagcttcaacaaattcgaatcgttctttgaagagcagggttttgcccttttgggagataggccttttgacaggagttagccgaggatcgttgctaggaggcggagtttcggagaatggaaggagtaacgaagggtttctcgtagtagggcttggaacgtgtcggggggtggggacttccagaaaaactgggcgacagggtggggtcggagacaaaaaataaaaatcaagtcggggttcgggggagccccctgaagttgggaggtgggacttccggggagaggggtctcaggggcgggacttataaatgaagaccggaagtggggtcccgggagaggggttccggggtgaaagagtgagtcacctaaggagaaaaaagtcaagactcaccagggcctcatggagtctccgcaccgcaccgcgggccgatttggtgccggatcacgccactgccagcttaggttaccgctccaactttctccccgggccctgcctccctggagaaactttattacactcacttccggcctcactaacccctgaccctctacctcagggtccctccttcacgct

SEQ ID NO: 1716 - DNA, 810 bp, Homo sapiens
acaggggctgggaatacagggccacctcctcgacgctccccactgcccactgcagaagctgcaaatgcctcttgggaggaagatgagaaatcagtggactccctggggctgaagtagttgctgctgctgggagattgattctcactggcccggctggaggcatgggagcgcgcagagcccatggtagcaggggccacagtgcccccactcccggatggcaccccagcaccagggacagtgacagaggtggctgcagcagtagtgatggtggtggtagctgaggcccggccttctcggagtagttcagtgcacttgtccacaatgtgccacatttggagcacagaccccactgtaaggaagttgacaatgtcagcagcagccatgctgaggcggccagtgtaagcggaggctaggacagtctcaaaggcgcctgggtccatgacactgggcagcgagatggaggtcatgcctttgagtaggacctgatcatggaagtaaggggaggaggcagccaggacagcccgatgagcccggaactcccggccctgcactctgatagatacatcgcagagctggccctgcagacgctgctgattgagggactccaagagggcactggtcacctcagggaaggacacatgtaccactgcagctgctggcaggggtagtgggggcggagccagcgacagcggcaggggaagtgctgccccactgggagacagaggagatggctccatgttgtggagggaggggatacccccccagccacaggaacaaagaaaggaggagggcggccgggggggtctctgg

SEQ ID NO: 1717 - DNA, 4359 bp, Homo sapiens
gtttattgaaggatttttctcatgcatattatccaagatttttttctgtcagagtattagcttcctaggattgctgtaacaaattaccatgaactgggtaccttaaaacagcagaaatacgttctcactgttctggatgctagatgtgcaaaaccatgttagcagggttggcaactactggaactctgagggagaatctattccatgcttttttcctatcttctgagggttcccacaatgtatcactccaatctctgcctccagcttcatgtggcattctcccctgtgtctctatcttctctttcttcctttttttttttttttttttttttgagacagagtctcgttctgttgctcacactggagtgcagtggtgtgatctcgcaacctccacctcccgggttcgagtgattcttgtgcctcagactcctgggtagctgacattacaagcaccacgcctggctaattttatttttagtagagatgggttttcgccatgttggccaggctggtcttgaactcctgagcctcaagcgatttgcctggcttggcctcccacagtgctgggattacaggcgtgagccaccatgcccgccctatcttctcttataaggaacaccagtcatattggattaagggcctgccctgctccagtatgacctcatcttagctacttacaaccacaaccacagtatttccaaataaggtcacattctgaggctccaggaagtacatgaattttggagaggacaccattcaacccagtacattcagtttctatttaacataaaaaataattcccatactatacaggatgaaaaaatgacttatgaaataggtgaaagattgttgaatatacaaatgtgatcttttcttttccaatcacatacagagataagaattttttgggaatatgtctcattcacaaatatgtattatatgcaaagagaaatttatacattgttcaagtaggattcagggaattaacctaggtgcgttctcttgtttctatttcaaccatattgttctccagatttttttcctaattctgatttccctgtaggattgttcagatttaaataaagcctgtaaagcagaagtagtgaacaagcctgggtactaaagttaaatattacagaggcagataaaataagtctgagaaaaattcatgcatttaattctatctattttgcccacatagttatgctgatatttcattcacttggattcaccaacttaaaatttgtaactataatggagaatcttttttctgtatttgaaaaaagtgcactgagcaaattaatagtataaatatgatttcaaggataactaagagaatatttatttctatgtatggttaatcaacatgcccccttccatattccatgtgccctttgactaattatctccaattcatctttcaggtcacaattcaagtataaataataaattagaagtacatattactataaaaaattgacatgtgaattatgaatcaatctcctcaatttgttaaagaatcttctaccaagtactcttttcttgaataaacttttacccatattacagttaccatatctttgtaacaacattaagggagcattgattttactatattaaatagacagttttctatttcaaatagacttggctgaattattttgattagctcaattaaaaaatacaagattctaataagagactttattacttactaaaggcattgtgagctattattaaaataaatacaattgacatgaaatataagttttgtgaaacaattctctgtaacgactttacatttttactttgcgatagatgaacaaaatggcccatatcatactgaaaaatccctttaaaataatagactataatttgaaagatgaaattttatcagtataacacacatttaaactaatattttaaaatttaaaatttgtaaaaagcctacatttgagaaagctaattattcacaagtagggacattaaaattcattccataatcatcattatttgagccacagaaagactgatgcaaattggaatatctaaattcaaaatttaggacatgcagatgtgattacaacatctttctctttggtagcttgagtttacgtatttagataaacacaacacagtattattttttaaaaaatttcctggccagaggaaggattgccttcaagagtccaatatgatgcaaagattaacacatttttccagtctggaggtgctgctgctccctgagtgtaactttctctgtcatgtatttcctacagtttctttttgagaaaaaagaaatgctaaatgctatcaattttcagactgtcccacacttaaacctataccaagacattcagggacataacatgagtaaagattagagaaattgtgagaaaaaatttgaagaataagatgatggtaacttataatttgatagctgctctaagcttggctgagcgccctctggggttatcttgtacatcctgatcttgtggactaagtaccttcttgtgtatcagttcccacattaaaggagctcttctcatagagacttcttccgtgttttcatgatctgaacccaattgagatgttttcatcacttgttgtctaacacttaggttaaatctttctgtcatgcttattccaagcaaaaatcttttgacgatgcgatcctctagtgaatggaaggagagggcaacaagacgaccaccaagtctcagaaacttctgagctgtcttcagtcccgtgtagagttcattgagctcattgttcacaaatatgcgaagagcctggaaagtcttggtggcaatataggtagattgctgtagtaagtctttccgtgtataaatagcagagggaggaaatgttcctgccaccatccattcttatgtccaaagggccatctttccgaagggaagaacctctttcaggagtatcaagttgcatggaggaacacccaagatccataagaactccatcaaaagttcctggctgcactccagctttcattaataaggcttctgcctggctgaactggcccagcatagctcggatttgtttaggatacaactctgaaagatgttcagctaatgcataagctgttgggtctctgtccaaggcatagagaacaatatctgactccttctgcagaatggcttttgtgtgccctcccgaaccaaatgtcatatctagaaaaatctgtcctttttgtggtgacaaacaatgaacaacttcatccaccattactggaatatgtaatttagccatagtttcaaaatctctatcttgagatctgtgtaactcctggacttgagtttgatctgtttgctcccgggcttcatattctctatatttttctgctgtagtatgtattctttttggccagacacctaaattaggtatgccagattccaaccaacatgaaaggcattctttatacattctacaaaaatatggataccgaagcattttgtaggtaaacaaatctgaagcacgaagacttctcagctggcctctaactcgggccagcgactaccactatggtccaggagaacctgaatgcgccacgcctaaagtagctttcttaagcttagcaaggtacagagttttctttaaccccttgttcataaagaatattatctttcataaagacgttgttaaggtctcaaaccttattaagaataatcccagctctaatcagctttttattgttcataatcaggagcttcttaccagaggacctcatttgaagctttgctttgaaggatgggacatccacttaactttgttctctattgtacctttctccaaagagtcatgtggagagggtcaaggtgatcagattgtttcagtaaagacacataaaagtatcttaaattataatataatgaattccatatgtctcctaacagaaatctagaacagattaattcaagattgattaattcaaaggtgcaacatttctaaggaatctgtgtgattctcttggctcttccctcatgactgcaaggactgctctggcttcaaataccacatctcatttgcaacatccaaatgtagaaagggttgatcctcatgaagtgcctttgtgtgtgtgtgtgtgtgtgtgtgtgtgtgtcttataagagttagaaaaaccttacagtaacactctagtggactttcagttatgtcttactattccgggttgcatcacaagaccatgcctaaaccaatccctggcaaggaggacagattgactatgaatgctttgaaataaccaacattcactccctggggaataggagttatccattaagcaagtggtcacccatacctgaacaagattgggcttctgtttgtaagggaaaaagaaaa

SEQ ID NO: 1718 - DNA, 6393 bp, Homo sapiens
tggatcctcttcctgctgagagtcccctaatgaacattgaggttgttgaggtcctcacactgaaccaggaggtggctggtccccggaatgcccagatccaggccctatatgctgaagatggaagcctgagtgcagatgcccccagtgagcaggtccaacagcagggcaagcatccaggtgaccctgaggccgcgcgccagaggttccggcagttccgttataaggacatgacaggtccccgggaggccctggaccagctccgagagctgtgtcaccagtggctacagcctaaggcacgctccaaggagcagatcctggagctgctggtgctggagcagttcctaggtgcactgcctgtgaagctccggacatgggtggaatcgcagcacccagagaactgccaagaggtggtggccctggtagagggtgtgacctggatgtctgaggaggaaggtaagtagaagggtgggtagagggacagcttaatgagggtgtcttggagtaccctgtgggggagataagaactccaggcttcctaggaaggtcatgggaaggattgtgtccgctccatacagaccaaggacatccatgttgcccacgtgttcctgagtcagagccactgaaacccttgcattctttagcccttcgtgggcttctgatggaagcacacagatgaagtgcttcatttttatccctctggcatccctgctgcaccataagccctgtagcacttgataagatagatgggaatactgagctcagagagcccgcagtagcaggagagacagggatttgacaaatgagaatgcatagaaaaatgctgggactatgaggagctcgaggtgatggtgaggcttatgaaggtctgcagctgacacctggtgtggagtggaacttggccagggtaaagaaagggggcaggaaagatgtgccatgcagaggggagcactgcctgtaagggccaagatggaagggatcacagtaaatgcaaaactcagaaaaatcggttatgtttgtgatggaagggagcagaggttggagctggcactgccagtggggactttagtcctaaagcaaagcaaaatgttcttctaaaacagtagggctcgatccctgagttccagaaactggtggcaccactggatttgacctttagagatttaccaggctgcatgtgtggtggatggtggacagaggatgggggcgaggctggacacaggctacccgcagctattgccatgccctctgatggggtggtgtcttggataggagtgatggtgatgtctgactggggagagactacacgtgtggagtgtgtatttgggaataagactgcaagacttggtttcttcatcaggctgagtttcacagagcgtgcatgcttctgcattgctcacctccattttccacatttcacgggtgcccagaagatgtttctgatgtgaacgaatgattgactggttgatgtttgtgattgcaggaaaggggaaggtatcctgcagggggatggtgggattctaagaggccagggcatcctggagatcgggtatccgaggcagcagggcaggcacttgcatgagttgtgtcagatgcaccaagtctggggtgctgtacttggcagaataattgccccaaaggtgtccatgtcctgactcctggaccctgtgaataagttgcctcacatgacaaaggggactttgcagaaacaattaaggatcttgagagggagagatgcactggattatttgagtggatctaacataaccacaggggcccttaggagagggaggctggagggtcagaggagatgtaatgataggagcagctgatagaggaagaagccataagccaaatgtttggggcagcctctagaagctggaaaaggcaaggaatggattctcccttggagcctccaaaaggaacatagccatgctgacaccttcattttagcccagtgaggcacaaaccagacttctcatctccagaaccataaggtaatacatttgcattaatctgagccgctggcattgtggcaattcactataacagcaataggaaactagttagttaggtgccaaggagacagttgtggggttaatgaggtgaaagtcagtgaattcaccctgtgtttaacctcaggggtgaataaaataaattagtgccacagaagacaatgggaagaggctttccagagaaccctgagaatctcacattatgtgatcagtgtgttagttgggacgcttgagtgtgactgctgcaaagccttgcacagaatggctcaagggagaaggagaatttattggaaaagttccagggtgctcgagcatcaggcagggctggacccaggagctccaatagtgtcctccagacttgtcctgtccctcattcttacctcttctgccctccactggcttcatcatgggcaggctgtctccctgcatgggatttctctttcccaaatgttccaactaaggccttgttggctccaatcatctggctataggctgtgttcatcccagatctaatcactgtggccaagagaaagggatggtccagtgtgccagcctaagtcatcttgtggcccaccttgatggtgggggtagattagcattgtggaagcctgtggaccatttggggtcatgtgaggaaggttagaatgaaggagccgtggttacaggggcccttgggccaggtggagctgttgttttcttaggtggaggagacttggtgacgttcacctcaagatggctgcatttcatgggtccagggaaagtctcaccttccatgaggtgggaggagagagggaagaaggaagaggtgcccaaataggcagggtgcagggcttggaggccggaaacaggggctttgactctaaggagggggcgtcagtcagctgcctcacaggaggggctggggccctcagcagcccccggaaagggaaggagtgggaccagagtctcagcagtgaggacactggtgccctgtgacccttggagggtgagccatcccgggcccatccaggtgtgggcactcgggcacgtgctgtgaggggagcagagctggtgggaagggaggacaggagcagaggctgtcatggagccacagtacgatgcaggggtgcggtggccccatgggttgcagagaggccacccttgccctgcctaagggtccccacacctgctgacctcctctggctggtgtctcctcccagtacttcctgcaggacaacctgccgagggcaccacctgctgcctcgaggtcactgcccagcaggaggagaagcaggaggatgcagccatctgcccagtgacagtgctccctgaggtaagcggggagtatcaccctgttttggtcacagcatctcctgtgaggcaggcccacccctgaggcatccactctgccctgggctttcctaagacctcccacaggctgggacattctgagattctgagctcttaggtctgtgctgaagcaatctgagtatgaagagcagccctgccctccagccactgtggcatcactggagacaacgcatggtgacccgggagctgagaaagcaggaggcaagagggaagggactaagtgtttacagagacttgagaggtggaactaccacaggcaggcacatctgtatccaggtcagaacaagagagccctcaaccttcagaaatgcatacttaggtatttatctttggtatctgggatttgcttcagaataacccagagctggggtgtgggtgaaaaagattggtcctgatgcgctgaccactggggtagtggtatgtatgtgtcattggtcagacctgtttgcactgcaaatggcttatactggctcaagcgtagaagtcaatttattggctctcatgtattctctggtaggcttcaggcaaggctgcatccaggtgctcccaggtgatgggaagaatctctggccaacctgtttcatggctctgctttctcccctttcttcttctttttttttgagatggagtttcactcttgttgcccaggctggagtgcaatggcgcgatctcagctcactgcaacctctgcctcccaggttcaagtgattctcctgtctcagcctcctgagtagctgggattacagacagctgccactacacccggctaatttttggtatttttaatagagacggggtttcaccatgttggccaggctggtctcgaactcctgacctcaggtgatccacccgccttggcctcccaatgtgctgggattataggtgtgagccactgcgcgtggccactcccctttcttcttaggcagattctgccccatgtaagcaaaatgcctcagatcctggcaaagcagcgttgggggtacctcttcttcccaaagtcctggtcagttccccagaaaggaccagtcatggctgtgccagggtgactgccctcccccaggtcagccctgtcgacaaaggcaggggcttggttgtcatttccaccaagtgggaagacagtattaatagatggagaaccctctgcagtgggaagatttcagcaatgggcaagctggatagagccgtggttaggatggagttgtttgcttgttgcacttggagctctttatgaagcaagggctctgcctcccagcctgagacccagaccctggtttggacccagtagaactcttgtgggccctgggttggtgtctctgagcaaatccccaaagcaggagagtccctagcaccgtgagctctgtcagaacctcccagctggcctttcttctgccctcattgacaaccctctgaccctcttgctgagcatagacacatatgtgatgttacaggagccagtgaccttccaggatgtggctgtggacttcagccgggaggagtgggggctgctgggcccgacacagaggaccgagtaccgcgatgtgatgctggagacctttgggcacctggtctctgtgggtaaggctgtgccccctcttcacccacctcagggctggtaggccacaggagccccaagtcaggggtgttcaccttctctagactccacactgggcattccctcaaggggcccttgctgcatccagggcctgtaagtggaactgtagacctagaggggtgaggtcactgggtggccagaagcagccttaggtccggtgaaggagtgatttgctatctatctcctgagggagtatgagagaacaggaactcgaagagctcggaggacactccctgcccttcctgtcccttgttcaccaaggtcagtgctcccctccctgccgcttcattgcttttcagtctctctccaggttgcatgactctatttgggagaaaaaaaaaatcctgacttttgaacttaattatgcatttcatgctctcagacccatcccagcacatctctctatgggatccacatcttttgtttatttttttcagggtgggagactacactggaaaataaagagttagctccaaattctgacattcctgaggaagaaccagcccccagcctgaaagtacaagaatcctcaagggattgtgccttgtcctctacattagaagataccttgcagggtggggtccaggaagtccaagacacagtgttgaagcagatggagtctgctcaggaaaaagaccttcctcagaagaagcactttgacaaccgtgagtcccaggcaaacagtggtgctcttgacacaaaccaagtttcgctccagaaaattgacaaccctgagtcccaggcaaacagtggcgctcttgacacaaaccaagttttgctccacaaaattcctcctagaaaacgattgcgcaaacgtgactcacaagttaaaagtatgaaacataattcacgtgtaaaaattcatcagaagagctgtgaaaggcaaaaggccaaggaaggcaatggttgtaggaaaaccttcagtcggagtactaaacagattacgtttataagaattcacaaggggagccaagtttgccgatgcagtgaatgtggtaaaatattccggaacccaagatacttttctgtgcataagaaaatccataccggagagaggccctatgtgtgtcaagactgtgggaaaggatttgttcagagctcttccctcacacagcatcagagagttcattctggagagagaccatttgaatgtcaggagtgtgggaggaccttcaatgatcgctcagccatctcccagcacctgaggactcacactggcgctaagccctacaagtgtcaggactgtggaaaagccttccgccagagctcccacctcatcagacatcagaggactcacaccggggagcgcccatatgcatgcaacaaatgtggaaaggccttcacccagagctcacaccttattgggcaccagagaacccacaataggacaaagcgaaagaagaaacagctacctcatag

SEQ ID NO: 1719 - DNA, 6815 bp, Homo sapiens
ttctacacagacatagatcaatagtttatttatccacattatcttttaatccttaattcatacacataaatactgtggtactgtggatgtaatatcagtgcagattattaattacctggctttttaaagttattatataacattttcagattttattaatctcacttttaatgactaaatgagtgaacaaacaatatcaagtgaatgggaaatcttttttccaaatgatgttaataactcctcactcattttcttatttattcattatgtgctgggcagtctcctcagttgtcctttggttttgggaatgtcctcactcaatacttccctttcacattcagtcctgattcacaagcaggcctgtgcatgttatattgcagggtcaagctgaaaaggcaaggtttcttcaactggcttgagagctatgaggtaggctgtttcttctttcgctttgtcctattgtgggttctctggtgcccaataaggtgtgagctctgggtgaaggcctttccacatttgttgcatgcatatgggcgctccccggtgtgagtcctctgatgtctgatgaggtgggagctctggcggaaggcttttccacagtcctgacacttgtagggcttagcgccagtgtgagtcctcaggtgctgggagatggctgagcgatcattgaaggtcctcccacactcctgacattcaaatggtctctctccagaatgaactctctgatgctgtgtgagggaagagctctgaacaaatcctttcccacagtcttgacacacatagggcctctctccggtatggattttcttatgcacagaaaagtatcttgggttccggaatattttaccacattcactgcatcggcaaacttggctccccttgtgaattcttataaacgtaatctgtttagtactccgactgaaggttttcctacaaccattgccttccttggccttttgcctttcacagctcttctgatgaatttttacacgtgaattatgtttcatacttttaacttgtgagtcacgtttgcgcaatcgttttctaggaggaattttgtggagcaaaacttggtttgtgtcaagagcgccactgtttgcctgggactcagggttgtcaattttctggagcgaaacttggtttgtgtcaagagcaccactgtttgcctgggactcacggttgtcaaagtgcttcttctgaggaaggtctttttcctgagcagactccatctgcttcaacactgtgtcttggacttcctggaccccaccctgcaaggtatcttctaatgtagaggacaaggcacaatcccttgaggattcttgtactttcaggctgggggctggttcttcctcaggaatgtcagaatttggagctaactctttattttccagtgtagtctcccaccctgaaaaaaataaacaaaagatgtggatcccatagagagatgtgctgggatgggtctgagagcatgaaatgcataattaagttcaaaagtcaggattttttttttctcccaaatagagtcatgcaacctggagagagactgaaaagcaatgaagcggcagggaggggagcactgaccttggtgaacaagggacaggaagggcagggagtgtcctccgagctcttcgagttcctgttctctcatactccctcaggagatagatagcaaatcactccttcaccggacctaaggctgcttctggccacccagtgacctcacccctctaggtctacagttccacttacaggccctggatgcagcaagggccccttgagggaatgcccagtgtggagtctagagaaggtgaacacccctgacttggggctcctgtggcctaccagccctgaggtgggtgaagagggggcacagccttacccacagagaccaggtgcccaaaggtctccagcatcacatcgcggtactcggtcctctgtgtcgggcccagcagcccccactcctcccggctgaagtccacagccacatcctggaaggtcactggctcctgtaacatcacatatgtgtctatgctcagcaagagggtcagagggttgtcaatgagggcagaagaaaggccagctgggaggttctgacagagctcacggtgctagggactctcctgctttggggatttgctcagagacaccaacccagggcccacaagagttctactgggtccaaaccagggtctgggtctcaggctgggagcagagcccttgcttcataaagagctccaagtgcaacaagcaaacaactccatcctaaccacggctctatccagcttgcccattgctgaaatcttcccactgcagagggttctccatctattaatactgtcttcccacttggtggaaatgacaaccaagcccctgcctttgtcgacagggctgacctgggggagggcagtcaccctggcacagccatgactggtcctttctggggaactgaccaggactttgggaagaagaggtacccccaacgctgctttgccaggatctgaggcattttgcttacatggggcagaatctgcctaagaagaaaggggagtggccacgcgcagtggctcacacctataatcccagcacattgggaggccaaggcgggtggatcacctgaggtcaggagttcgagaccagcctggccaacatggtgaaaccccgtctctattaaaaataccaaaaattagccgggtgtagtggcagctgtctgtaatcccagctactcaggaggctgagacaggagaatcacttgaacctgggaggcagaggttgcagtgagctgagatcgcgccattgcactccagcctgggcaacaagagtgaaactccatctcaaaaaaaaagaagaagaaaggggagaaagcagagccatgaaacaggttggccagagattcttcccatcacctgggagcacctggatgcagccttgcctgaagcctaccagagaatacatgagagccaataaattgacttctacgcgtgagccagtataagccatttgcagtgcaaacaggtctgaccaatgacacatacataccactaccccagtggtcagcgcatcaggaccaatctttttcacccacaccccagctctgggttattctgaagcaaatcccagataccaaagataaatacctaagtatgcatttctgaaggttgagggctctcttgttctgacctggatacagatgtgcctgcctgtggtagttccacctctcaagtctctgtaaacacttagtcccttccctcttgcctcctgctttctcagctcccgggtcaccatgcgttgtctccagtgatgccacagtggctggagggcagggctgctcttcatactcagattgcttcagcacagacctaagagctcagaatctcagaatgtcccagcctgtgggaggtcttaggaaagcccagggcagagtggatgcctcaggggtgggcctgcctcacaggagatgctgtgaccaaaacagggtgatactccccgcttacctcagggagcactgtcactgggcagatggctgcatcctcctgcttctcctcctgctgggcagtgacctcgaggcagcaggtggtgccctcggcaggttgtcctgcaggaagtactgggaggagacaccagccagaggaggtcagcaggtgtggggacccttaggcagggcaagggtggcctctctgcaacccatggggccaccgcacccctgcatcgtactgtggctccatgacagcctctgctcctgtcctcccttcccaccagctctgctcccctcacagcacgtgcccgagtgcccacacctggatgggcccgggatggctcaccctccaagggtcacagggcaccagtgtcctcactgctgagactctggtcccactccttccctttccgggggctgctgagggccccagcccctcctgtgaggcagctgactgacgcccccttcttaagagtcaaagcccctgtttccggcctccaagccctgcaccctgcctatttgggcacctcttccttcttccttctctcctcccacctcatggaaggtgagactttccctggacccatgaaatgcagccatcttgaggtgaacgtcaccaagtctcctccacctaagaaaacaacagctccacctggcccaagggcccctgtaaccacggctccttcattctaaccttcctcacatgaccccaaatggtccacaggcttccacaatgctaatccacccccaccatcaaggtgggccacaagatgacttaggctggcacactggaccatccctttctcttggccacagtgattagatctgggatgaacacagcctatagccagatgattggagccaacaaggccttagttggaacatttgggaaagagaaatcccatgcagggagacagcctgcccatgatgaagccagtggagggcagaagaggtaagaatgagggacaggacaagtctggaggacactattggagctcctgggtccagccctgcctgatgctcgagcaccctggaacttttccaataaattctccttctcccttgagccattctgtgcaaggctttgcagcagtcacactcaagcgtcccaactaacacactgatcacataatgtgagattctcagggttctctggaaagcctcttcccattgtcttctgtggcactaatttattttattcacccctgaggttaaacacagggcgaattcactgactttcacctcattaaccccacaactgtctccttggcacctaactaactagtttcctattgctgttatagtgaattgccacaatgccagcggctcagattaatgcaaatgtattaccttatggttctggagatgagaagtctggtttgtgcctcactgggctaaaatgaaggtgtcagcatggctatgttccttttggaggctccaagggagaatccattccttgccttttccagcttctagaggctgccccaaacatttggcttatggcttcttcctctatcagctgctcctatcattacatctcctctgaccctccagcctccctctcctaagggcccctgtggttatgttagatccactcaaataatccagtgcatctctccctctcaagatccttaattgtttctgcaaagtcccctttgtcatgtgaggcaacttattcacagggtccaggagtcaggacatggacacctttggggcaattattctgccaagtacagcaccccagacttggtgcatctgacacaactcatgcaagtgcctgccctgctgcctcggatacccgatctccaggatgccctggcctcttagaatcccaccatccccctgcaggataccttcccctttcctgcaatcacaaacatcaaccagtcaatcattcgttcacatcagaaacatcttctgggcacccgtgaaatgtggaaaatggaggtgagcaatgcagaagcatgcacgctctgtgaaactcagcctgatgaagaaaccaagtcttgcagtcttattcccaaatacacactccacacgtgtagtctctccccagtcagacatcaccatcactcctatccaagacaccaccccatcagagggcatggcaatagctgcgggtagcctgtgtccagcctcgcccccatcctctgtccaccatccaccacacatgcagcctggtaaatctctaaaggtcaaatccagtggtgccaccagtttctggaactcagggatcgagccctactgttttagaagaacattttgctttgctttaggactaaagtccccactggcagtgcagctccaacctctgctcccttccatcacaaacataaccgatttttctgagttttgcatttactgtgatcccttccatcttggcccttacaggcagtgctcccctctgcatggcacatctttcctgccccctttctttaccctggccaagttccactccacaccaggtgtcagctgcagaccttcataagcctcaccatcacctcgagctcctcatagtcccagcatttttctatgcattctcatttgtcaaatccctgtctctcctgctactgcgggctctctgagctcagtattcccatctatcttatcaagtgctacagggcttatggtgcagcagggatgccagagggataaaaatgaagcacttcatctgtgtgcttccatcagaagcccacgaagggctaaagaatgcaagggtttcagtggctctgactcaggaacacgtgggcaacatggatgtccttggtctgtatggagcggacacaatccttcccatgaccttcctaggaagcctggagttcttatctcccccacagggtactccaagacaccctcattaagctgtccctctacccacccttctacttaccttcctcctcagacatccaggtcacaccctctaccagggccaccacctcttggcagttctctgggtgctgcgattccacccatgtccggagcttcacaggcagtgcacctaggaactgctccagcaccagcagctccaggatctgctccttggagcgtgccttaggctgtagccactggtgacacagctctcggagctggtccagggcctcccggggacctgtcatgtccttataacggaactgccggaacctctggcgcgcggcctcagggtcacctggatgcttgccctgctgttggacctgctcactgggggcatctgcactcaggcttccatcttcagcatatagggcctggatctgggcattccggggaccagccacctcctggttcagtgtgaggacctcaacaacctcaatgttcattaggggactctcagcaggaagaggatcca

SEQ ID NO: 1720 - DNA, 466 bp, Homo sapiens
tggatgagagaacctaacacaactgaactcagccttagagccacctcaagcccaggtgccagccatgagatgagccattccataccttggaatggacccactggccttgtactttgtagttccaatcagctctcccataccctagtatgttctccccctttcctattcctgggtcccttattttcccagacccagctcaaaccatcatctcagttcctgaagccatcactaaaactttggactcacccctcagtctaggatttggaatctgggaatttttagtttaccaggttctaatctcaagggtcccattctttggttcattcttgagaggtgatattgtagagttctgaacagctgaggaggctgtttttaccaactaacgtccctgggcaagttcttcaactgtgtatgttctcaaagaagctaacatgtgccatattaaagtgctgaaatgactagaagc

SEQ ID NO: 1721 - DNA, 249 bp, Homo sapiens
ggtttctttcttgggtgaagaaaatgttctggaattagacagtagtgacagctgtacaaccctgtgaatatatttaaaaacactgaactgtacactttacaagagtgaactttacaatgtgtgaattatatctccatagagctgttatagggaaagaacaaaaggcaatgagggttgagaagggatctgtgacactgtacatgtatgcatggtcacaggaaaaagaaccttctccaacctccactgggg

SEQ ID NO: 1722 - DNA, 7986 bp, Homo sapiens
cgagaagctggttgtgcgctgaggcgaccagcgccggaaggcacggtggcgactcacgctgttctcgccgctcagaggcgggtctgaggctcggtggcggcgcccagggtggcccgggccctttcctcggtcattgtctcccctccagctctactcacaggctccgatggcggcggccgccctgagggaccccgctcaggtgagcgccgcgtcctcctggcctcccccgaatcctaaagccctgtgagggccgcctgctcaggtccccgggtgcagaactgtggggcgttcgtgcgcggcgtcccgtttctgacacgcagtgtgatggggtggcaatggagggcaaggggcccggctcgcaaagatgtgaggcgcattcagcgagtcccgaacctgaggcctcctggtgtctgtagtgggcagcttgggaagggacgaggcgcgtgtcgagcgacagcccgagcagctgcgctttcatcctgagggggccacagtggccgcggagggctggagacagaagagtgacaagatctgtttctcaaagtttgccaaaggcccttcaagtcaaaacagactggggtgggggtgaggcgggtgaagacagacctgtgagtaggtaaattcagtagactagtggagagtctactgggactgggccacagaggaggggaagtgatcagatcttggatggatatcaaaaactgaacagacaggaattcctgttgcatcagatgtgactgaaagaaagggaatgaagagccattctggatttttatttgtatttttgtttgtttgttcctgaatatcaggaaggatggagatgggtaaggctgtgcagggagtaggttttggacatggtaatcctgagatgacccagagtggaggtgtcgtgtccacatgggcagcttgcccactcacatctggaagtttggggagggatctgggctggagatatggtagatatgggctggttgggtagaggcctggactagggtaagtcctggggctcctatttaggagggagaatcttaaggttccctttcagatgggccctaaggtgagagaagggagagatggccctgtaggacggggctgcctctatagcatggagttttgtggtcagaagtggttctgtctggtgtctgccggaatggagggttatagagtatgaagacccaggactgcatggagactgcagtgttgagtagtatataggtttgccactccaggctcagcagttcctcatgtacagtccgtatggacaaaaggaaacgtcagccaggctgctggagcagcccctttggtgcctaagtttccctagccgtcagcacaggagggatgatcaactgctccagtagaagggctctcagcaggatggtcttcaggggagtatatagcaggcagccaggttgccaaaaggaatggtatgtgctcaggtttctcagacccaggtcccagtttattaacttgtgaatttatgaggtaagtatttaagcactaattgatcatagttcatatacacacaggggcaaataaaacaacacggatttattaagttaaactgatgtaagcacttcataattggttgtaaagttagtatactggaaagtatttgattaaaataaagcaccttaagtatcacattcttaatttaaaagtaagtttaagaaacccatattttctttttctttctttctttcttttttttttttttttttttttgagacagagtttcgcttttgttgcccaggctaaactgcaatggtgcaatctctgctcactgcaacctctgcctccctggttcaagcgattcccctgcctcagcctcctgagtagctgggattacaggcatgcaccaccacgctcagctaatttttatatttttagtagagacgaggtttcaccatgttagccaggctggtctcaaactcctgaccttagacgatctgcccacctcggcctcccaaagcattgggattacaggtgtgagccactgcgcctagccagaaacccacattttgaaaacctaccagtttatttgcgctgaaaatgttgacagaagcattaattatgtgtacagtaagagttgatacttagtcctagacacataagaatgagtttgatacaaacaatcgtcctattgagtaaataccattattattgccatgttgcagatggcaacaccaaggcacagggaagttgagcacttttccaagggcacacaacaggtaagaggcatcactaagaaccaaagcccagattgtagatagtcaggcacacctgactccaggctagacgagtgggcttggatgatcctttggcaacatcactgtctggttctcatagtcttgattttccataggttcctgtggctgcagacttgcttacagaccatgaggaggtaagtggaggatgtctcaggtcctcacactcctgcactcctacctacatggtcttcagaattatggtgtcttgaggctccttgctggctattctccctacccttccatttgagttccctggaagatggtcacacacagtcagggccctgagtccagactatatattatttttattattttcttttaagacagagttttgctcttgttgcccaggctggagtgcaaaggcgcgatctcggctcactgcaacttctggctcctgggttcaagcaattctcctgtctgagcctcccgagtagctgggattacaggcatgcgccaccacaccagctaattttggatttttggtagagaggtttctccacgttggttaggttggtctcaaactcctgacctcagatgatccgcccgccttggcctcctaaagtgctgggattacaggcgtgagccaccgtgcccaacccagactatgtattctatggagaggttctcatttctggcaaccaatgacaggaggtttagaaggcatagtgatcaacattagaaaatacatggaggtaaggttgagctgggaatgcttagacaacctcagatctccattatgtctgggggaagcatcagcgggtataaggccaacatgaagtgattggctgaggagctgagctgaggtgtcctgatatgtgtgcaattccaagtagctaaagatgaagcaagaaaaagagccaaggagggaggccttcaaagtggggctgaggattggccctggcagtcagtgccattgggggtctgggatggcacggagttctgattgcatttggtaagtgccctctggatgccatgtgtagactggcatgtggtgacactaggggaagcacatgaggtgatgtagagggtagtggttgtggtacaaagtatgtgcacattctaataagtgtaaacagatgtccccaggaccttgtactgggggcttcagggagaacactgacacaaatttgattgtatttgagaaacacagtctaggggatccaaggtaaattgtctggcaagagaagagtaggactctgcataccatgcccagagctgagatggactttatctgcctacctgcctattgttgctcagtgggagcatgaggagagagtgggcatcagtggctctggggcagggtctctcctctgagatggggattaaggaagagggtgagcaggggtggatgtttaggcagatgcctaaatttcccagtaaggaggctgcagataaactctactctgtccatcttagcagggctatgtgacctttgaggatgtggctgtctacttctcccaggaggaatggagattgcttgatgacgctcagaggctcctctaccgcaatgtgatgctggagaactttacacttctggcctctctgggtaaggttctcacaccccaccccagcatcctgagctgggctcggcttttcctccttttcctagggagaggtctgttcttcccaaagctgaactgtgggcactcattccttctccagtatcctgaagtagctattgtaataggcctgggctgtgtatactaccaccttctctccccaagctgccccacagctgtgcaggaaagggtttgggggtcaggagtcttgcagtcagcttgatggatcttatccctggtggcctctctgtggcctggtgacactgtgcagatctgtggtagttctattcccctacattctgcctgtctcctctagccaacatacctgggtgtcggtctgtgccagcaattgagtcaccaatgtgattgctgtttgactgtgttgttcctgcaagaccctcctccaaggttctttctgtactattttgttttctttcctgtggtccatgatgagataagtcattctggctcagtgctgccactcacctgtcgttttccttaggacttgcatcttccaagacccatgaaataacccagctggagtcatgggaggagcccttcatgcctgcttgggaagttgtgacttcagccataccgagagatagttggtgggtggagctcagggaggtgtgaactcagggatggattcatatcataccagtaggcccagatattttgataccaaggcaaggggttgtcgctgatttctatcttttcttccttagtcacccatttatatctattctgatgtttgacctagggccattccccacctctctgtcctccatgtttcacccagtcatcagcagaacccttcagcagtggctttcactgaatgtgtggtgaggtggatgcttatccttgcatagtccttgagcatcagctatttggttgcagttggttttttctggacctggacataaccttctgtgccgtgttcctgtgtctccagcagccaaagtcctgtggaaagccatttgcagaggattgtgttggggacactgcctctcctccctgtgctataccccatccttgcatccttggtgctcatgaggcctccccaaatccttgagctggccagattcagcactgcacagcaggcccttccctgctgagagctagccctctttatttctgctagcagccccaggcactaattactgggtgtgttagacacatctgtgagagtgctgcctcctcacaccaaagtctacatttacttcttcaacatttatcttctgtcaggttgttggcatggagccgaggctgaggaggctcctgagcagattgcttctgtaggactgctcagttcaaacattcagcaacaccagaagcagcactgtggagagaaacccttaaaaagacaagagggcagggtcccagttttgaggagttgcaaagttcacctatcagagaagtccttgcaaagcagggaggttgggaaggccctcctgatcagctcaggtgttctcaagcaccaggtgactcacacaggagagaagtcacataggagctccaaaagtagggaggcctttcatgctggaaaaaggcattacaaatgcagtgaatgtgggaaagcctttggtcagaaatatttacttgttcagcaccagagactacatgctgggaaaaagacgtatgaatgcagtgaatgtgggaagttatttagagatatgtccaacctttttatacaccaaatagttcacactggagaaaggccttacgggtgtagtaactgtggaaaatcctttagccgtaatgctcacctcattgaacaccagagagttcacactggagaaaagccttttacatgcagtgaatgtggaaaagctttcaggcataattccacacttgttcagcatcacaaaatccacactggagtaaggccttatgagtgcagtgaatgtggaaaattgtttagtttcaactccagcctcatgaaacatcagagaattcacactggagaaagaccttataagtgcagtgaatgtggaaaattctatagccacaagtccaaccttatcaaacattggcgtgttcatactggagaaaggccttacaagtgcagcgactgtgggaaattttttacccaatgctcaagcctcatgcaacatcaaaaagttcacactggagaaaagccttttaagtgcaatgaatgtgggagattctttagagagaattccaccctagttagacatcagagggttcacactggagcaaagccttatgagtgcagggaatgtgggaaattttttagccaaagctcaaccctcatgcaacatcgaaaagttcacattggagaaaagccttttaagtgcaatgaatgtgggagattgtttagagagaattccagccttgttaaacatcagagggttcacactggagcaaagccttatgagtgcagggaatgtgggaagttttttcgccacaactccagtctttttaaacatcgaaggattcacactggagaaatgcagtgattgtgtgaaatcctttagccagcgtttcaacctcattcaacaccagaaagttcacagtggaaaaaatcttgaaggtaacagatggaaatccgttagccacacctccagtctcattcaacactggacagtttacaatgtggacaatgtagtgaatatggaaaaaggtttcagccaaaggcctaaccctattcaacaccagaaagtttacactggagaaaggccttagggtgacaggttatgtactgtctctgaatcaatatgacctcacttaaaacagaaactctgaggatggcctttatgagggagctggcaattgaacatcattcatctaaatatgcacactggaggcaagatgagaattcctgacagattgtccttcctgagaagacagccctctgccttggagctccagagagagggagccctgtattcttggctgtacccgtcgaatggagttttgatctcgctgagtttggagttgggggaggaaaggagtggtcttggttcaaatgtgactcacttttgctgttcttgtgaatgttagatcttctttaataaatatttatttcccatacacccttatgaccatttccagagactgaattgtgtttttataattttcacccttttggctgtgtaacaggtctgcaaagctcctcattcagttattctgtaagttgatccaaatgtttcaaattttaagaacttgccaaattgtgttctaaatggttagcatttcatatttcctcctggaatatattagattttccatttcttcacattactgacagtttatatgtgtagaagtcataggccattcattttagccatgttactaagtgtgaagtagtatttcattgtagttcttaatttgtatttttccgatgactcagttttgagcattttttaatgtgtttacttgtcacccatatatcttctttagtcaaatgtattttttgcctgttttttaaaacatttggttggttacaagttcttaatatttctggagacaaattccttatttgatataagcattgtcaatattttctcatggtccatggcttttgttttcttttcttttttaaaatttagagatgaggtcgtgctatgttgcacagactagtctctaactcctggcctcaagtgatcatcctgcctcagcctcccaaagtgctgggattacaggcatgagccaccatgcttggccttgttttcagttcttaacagtatctttcctagagcagattgtcttaattttatggagcccaatttatccatttgttattttattcattgtgcatttggtgttgcatcctcttactataccatatctttgcctataaataaaagccttgactgagtgcggtggctcacgcctgtaatcccaacactttgggaggccaaggcgggtggatcacgaggtcaggagattgagaccatcctggctaacacagtgaaactccctctcaactaaaaatacaaaaaattagctgggcgtggtggcggctgcctgtagttccagctatcctggaggctgaggcaggagaatggtgtgagcccgggaggcggagcttgcagtgagccgagattgcgccactgcactccagcctggggcacaaagccagactctgtctcaaaaaaaaaaaaaaaaaaaaaaaaaaaaaaaaaaaaaaaaaaaag

SEQ ID NO: 1723 - DNA, 7879 bp, Homo sapiens
attaatggtggcttaaagaacaggcctttattatcatgagcaatgtgaagcaggcagttccagagctgggtgacttggatattggatatatccataacgagcatcatatgaaatcaatcaacacaggtaagtctctgcaggctatttgcagaatccttctgtgtcctcttgaacaaagctgattatttccatgccatttacatcaaaagagaggaaattaagacccctagtgggctgtgagaccactcacaacaccttttagggactggggagagaagagaggtctgcccgtcacaagcatgctggggtaaatggtaaacgcagtatgattctgccagatggtaggagcagatggctcctgccccagcaaaggccaatagccatttaaaaagtgcaacacagctgctgaaagcatctcacatacttgacactcacagggaatctccccagtgggaatgtccatatctatgaagtttcacttcttactgatggttccctcccaatggctgctcccagagttccactctagggtgagctgttgggctgaacagagacagcacattgcttagactgctaaggcctgtgtccggtgtgaaattcccaatggcgggtaaggttcagcctccaggggaaggctttcctgcatctgctgcactcattaactactgctagttccccaccatatagtaagtcaggggcattggcctaagactttcccccacatttgctacactcttaaagcttttctccagcatgaaccctctggtgcagaacaagtgtctgtttccggatgaattctctcccgcactcactacacacataaggcctttccccagtgtggactttccagtgcctgatgaggttgggtctttgagtgaaggctttcccgcacttgctgcactcataaggcttttctccagagtgaactttctggtgctgaatgagtttggagatgcagctgaaagctttaccacatctgctacactcataatcactgctgtgaattctccagtgtacattaaggtgggagctttggctaaaggccttcccacattcactgcactcataaggcctttctccagtgtgagttcgttggtgcagaacaagtgtgtgtttccgactgaactctttcccacattcgctgcatacataaggcctggctcctgtgtgaacttcctggtgtcgaatgagattagacttactgctaaaaaatttcccacatttgccacactgatagagtctttcacccgtgtgaactcgcctgtgctcaatcaggccggagatttgtctaaagaatttcccacattcgctgcactcgtatggcctttctccagtgtgaactgtctggtgtttaaagaggtcatagctttggctgaagaatttcccacattcgttacactcataaggcctttctccagtgtggattctctgatgccgagcaagtgtgtctttgcgggtgaaggctttcccacattcaccacacctgtgatacctctgtcccatgagaaagccactcacaagcttagtgctcttgtggggcttcatgctgctgagagaggcctgatgctgaagaaggccagatgtggctgaaaagtctctcctacctttcccacatgtgagggtcttctctggcacatggactctgcagcttttcacagagtctctgccctccttccttgggaaaagtttccctccattgggctggttctggtgctggtcaaagtctgtactgaaccagaattgctttccacatgccccacacaagtatggtttctgcctggcttttcccccatggtatttagccaggtgtaaggtatctttcaatattgggccacatatgtcacatgggtgagactccagctctgccatgagagtcctgacctctgacactcctgctacaaaaatgctctgctcagaagatacctcttcatcctccactccatgccaacaacctgaagaacacacaaatgctgattaaatgcatatttacgggtgggaaggggcaacctcattgtatatgtgcatttgacacatgcaggaataagttcatgaaactgttttcagaatgagaggcatggtcagagtgaggaaggaatggctttgaggtagtgagcctctggaggtcataccatgggggagtgccaatgaagggccaggatataagaatggaaccaaacaaatggcttccagtagggccttgactgttagtgactcgtgagtgctatgaaaaatgtatccagtcccaggaaaatccaactacaagtgagcagctggtgttcaaagactatttaagaatatatgcacatcttgtgaacattaattgcaggtcaatactgccaaaaaatgtagacagagaagtggtgaaacatgggtgtaaggtgaaggccagaggtgagggtggcaaggggctaacaaactagaaatgatatatcttcgtgtcaagaacaggaaaggacagatagaaacgctgtgtggccactggccctggaaacaaacactgatgtgaacagttaatgttgccagttttgaacccagctttgacatcgtgcccttccccgatgtccactcaccaggtctaagtcccctctgggcctctctttctgtggctgaagtcatatccacctggtcatacacccagggctcttctcctcgctctagtttcatgactgcacgtgatctggaaaatgcaattcctaagggaaagtcagaacaggtgagcagccagcactggcccatggcaaaccaccctatgatggacttcaggtaagaaaaataacctgggaggagttgtgcaggaataacccaaaggtccctataagtgactatgtaagtgcctataactcctgacaaggtcaggccctagaagatgtcacctgagctgggcgcagtggctcacacctgtaatctaacactttcagaagtcaagtcagggtattacttgagctcaggagttcaagaccagcctgggcaacatggcaaaaccacatctctacagaaaaattagctgggcgtggtggtgtgtgtctgtagtcccaactattcaggaggctgagatgagaggatggcttgagcctgggaggtagaggttgcaatgagctgagatcatgccactgcactccagcttgggcaacagagccagaccctgactcaaaaaaaaaaagaaaagaaaatgtcacctggagaaagggacagaaccttgggcacagaggcatcataattttggacagagtcaccagtacagaaagcgaacagacctagtgagatccactgggcaaaccacaagtctcatgaccccaaacccttggctgcacggcttcaggactactcagcaagtagggaggacactccatacagcttagccctggcatcttgagcacctactccaggaaactggtgaaggaagcggtgctcatgatcccaccataggaagaacagagtggtaaaggcagaaaagcatgaggaccttacccagtgaggctaaaagtgcaaagttctccagcatcacatcatggtacaaaagtctctgagcatcatcaagaagctcccattcttcccgagagaagtatacaaacacatcctcaaagaccacacagccctgcaacaaaagggacaggaaggaccataaaaagtctcttgaccaatgatccccagtctacctacccacaacatcctgctaactaacctcccaggttcccaagtcagagataccaggcactagtaccactgatcctcactctctcctgatcaccccagcaatcactgtgtcagcccaccacaacaacagacaggctgacagataaatgccatttacactctgagccagccaactcccctggggtacccaagatcacaaatcccaggtatgaacctaggctcatttttctcagttaagccccaagtcacaggaccgtcagctcacactccctcctctcatacacatcactctggactatgtctccctcacatctccagcttcccccccaccctactggcccaccccatctccctggactccccaaatgtcactctacacatagcattaagagtgcttgccgaaggcagatcacgaggtcaagagagcgagactatcctggccaacatggtgaaaccccgtctctactaaaaaaaaaaaaaaaaaaaatacaaaaattagctgggcatggtggtgtgtgcctgtagtcccagctacttgggaggctgaggaaggagaactgcttgaacctgggaggcagaggttgcagtgagctgagatcatgctactacactccagtctggcgacagagtgagactccatctcaaaaaaaaaaaaaaaaagtgcttgccaacaatcagtatcccatcttgctccaaaccatcaatggccccattgccaaggaaagccctattgttgctctgaaagcctcccaatctggccctgttccttttttcaatcacaggcacctcaaaccacatgcagatctcaggtatcctcaaccctcttccatttctttgttgcacattgtaccactgtttgatatggattggatgtgtatcccctacaaatctcatgttgaaatgcaacccctagtgctggaggcccagggaagccaaaagattggacacccctgatttaaagtgagagatgtgtaactactcctttaacttgaactcttagaggccactgtagggttattaactgacctgatttcaatattgctgtgtgtcagggaataggaacgcttaaagagagggagaaggatggggatcagctggtcagtgaggcagtcagaagacacataacaatttttttttttttttttagacagattcttgcactgttgcccaggctggagtgcagtggcacgatcttggctcactgcaagctccatctcccaggttcacaccattctcctgcctcagcctcccgagtagccgggactacaggcgcccaccaccatgcccggctaattttttgtattttcagtagagacaaggtttcaccatgttagccaggatggtcttgatctcctgacctcgtgatccacccgcctcggcctcccaaagtgctgggattacaggtgtgagccactgcgcctggccgactttaggcatttgacacagatctctaactaacttaatgcaggcagcaggagataaatacccatgctcagctgcatcatgaaaacggaagaaactggaacacattcaacaccctcaacacattccagctacatcaaaagagtctggttcctaccttctggccttaggataatgacagaatgtagtacatcctaagttccagagagttaccaaaaacagagacagcattctggacaaacacaaagattagagaagcaccttaaatctttggccagatggattcgtgagatccttctactacactaggcaagactgggagaagtagtgaacttttttttttttttgaaatggggtctcagccaagcatgatgactcacacctgtaatcccagcactttgggaggccgaggcgggtggatctcctgagggcaggagttcgagaccagcctggccaacatcgtgaaaccccgtctctaccaaaaatacaaacaaattagctgggcgtggtggcgggtgcctgtaattccagctactcaggaggcagacaagagaattgcttgaacccagaaggcagaggttgcggtgagccgagattgtgccactgcactccagcctaggaaacgtggtgaaaccccgtctctactaaaaatggaaaaattagcggggtgtggtggtgggcacctgtaatcccagctactcgggaggctgaggtaggagaactgcttgaacccaggagacaggttgcagtgagccgagatcgcgccactgcactccagcctgggtgacaagagcaagactccatctcaaaaaaacaaaacaaaacaaaacctggccaaggcatggtggctcactcttgtaatcccagcactttgggaggccgaagggagtggatcaactgaggtcacgagtttgagaccagcctggccaacatggtgaaactctatctaataaaatacaaaaattagctgggcatggtgatgcatgcctgtaatcccagctactgggaaaactgaggcaggagaatcacttgaatctgggaggcagaagctgcagtgagccaagatcgcaccattgcactccagcctgggtgacagagcgagactcgtctccaaaaaaaaaataaataaataaaataaaaccaaagccaagtgcagtggctcacaactgtaatccaaacactttggaaggctggggccggtggatcagttgaggtcgggagttcaagaccacctgggccaacacggtgaacgtcccccccactcccccgcccccaccccacccctcccacctccccaccccaccccacccctcccacctccccacccccgtctctactataaatactaaaattagccaggggtggttgtgggcacctgtaatctcaactacttgggaggctgaggcgggagaatctcttgaacccgggaggtagaggttgcaataagccactgcatcccaccctgggcgacagagtgagacttcgtctcaaaaaaaataaaaaaaataaataaactaaaactaaaagaaaacacacaaaatgagggtgagataatcagatagtagcaatagcacaccacccatcgttgccatcccaggccaaactcctcataccctacagctctctcctcctgcaaacactgaaaagaaccctttcaaatggcaggacccttctcttctggggggagtctcaagaatgcccactccctcttccctgccctgcagtcccagccttctcatctcttaccccagagatatgaaataacatacttaagactgccccacttaaatctgacctcctggccttgacctactccagaccgctcccttcaccccaaagatattctaagcccagccccttccccacaacttcagaccttcctctctagttgcctaagtgaggaagcctccactctgagacatctcaaagtcaccattccaaaatccaaacgttcatggaaaaacaacaaaaacaccttgctctttcatgccttactttcagtcatagctgcatatgatggagcagaaaatcctgttggtttcaaatttaaaacctacccagaatatgatcacttctacccactcacctgccattactcttggtacatccaccaccaaagcattcctggaatccactgcagtagcctccttaccggtctcctcgtatccatcctcgcagtccccaccccaaactaatgttctcccctgagcaaatttcgagacacttaaaatcccagctaagatcacgtccttctattcaaaaccctcagttaatctcaacgccctcagaatgaagcgacaacttctcagcctgccattccagtcacagttcctcaaactctgctctgtgttgatgagaaccctgtctcccaaatgtttgggggtcagcagcacccccgagcctttacctgcgccgtcccctccgcccgtaactctcccacacccacccacaccgagataggaccccgccccaagagtgcgtcgctgtcctgggacacaggggctgcaggcactttacgattcggagtcggagaaagggtgactgagggcccggaggacgcagcacccacccgcgcggagtccgttagctccgccataggaccgtgggcgcggacagctgccgggagcggcaggcgtctcgatcggggacgcaggcacttccgtccctgcagagcatcagacgcgtctcgggacactggggacaacatctcctccgcgctttcccaacacctccacctgcggcccacacaagcgttacagaaccccggccagggacagcctgacagaaacaaaatgtccgctac

SEQ ID NO: 1724 - DNA, 335 bp, Homo sapiens
aggtcctccagacaaggacacctgcctattaaattctgaacacagactccttgacaagaagcaggggccagcttcccaataagtgcttggaaatatggaacactggatgggaaccagtgaccaaactcatgctcccaggtgctctagaagttgttacaactgatctctcttcatggttacctccaaacctacagtaaaactggcatccaggtcacatgatttgtctcccaaagccctgcagtctgtcttagaagggcttgaacagcaacacaaattaggtcaaagctgtaatcagagctgttctctgccatttgctctaagggacagaaaacaag

SEQ ID NO: 1725 - DNA, 501 bp, Homo sapiens
cacgcaccccccgcaggcactgaaacacccctctcctgggccctcattgggtatgcaacgtataggtttgtgggtagagtgtggttcccactgagctatccttcaaggcaggggattctcggcctgggctcttgggaaaactcgaagtaggagggccaagttgtttgggaaaagtaacccgagtttcaaagggctgacaggacttccgtcctcttttttttttttttttttttttttgagacagagtctcgctctgtctcccaggctgcagtgcagtggcgcgatctcggctgactgcaacctccgcctcccgggttcaagcgattctcctgcctcagcctcccaagtaattgggactacaggggcccgccaccacgccaggctaattttagtacttttagcagagtacgggatttcaccatgttggccaggctggtctcgaactcctgactttgtgatttgcctgcttcggcctcccaaagtgctgggattacaggagtg

SEQ ID NO: 1726 - DNA, 11977 bp, Homo sapiens
aggccctcaccagacaccaaacctgccagcaccttggctttggactttccagccttcaaaactgtgagaaataaatttctgtgctttataaaattacctagtctatagtattttattacagcaacacaaatagactgagacagaagtcttctttttttgagatgagatctcactatcacccaggccagagtctagtggcacaaccatagttcactgcagcatcaaattcatgggctcaagcaatcctcccacctcagcctcccaaggagctgggacaacaggtgcacaccaccatgctcagctaatgcgtaagtcttttaaaagttacactatatgagggaaatgaagaataaagaccccttggattcagaagagcaagagaagcccagtggaacatgaagggaaaaagtgctcggtcatgcagcagaagagcaggatcaacaggtgtcactgcaggatcatggacactatcacatgacaaaggaatgtgctcagaaggtatagagtgataatgttaaagccattagcaaggccaggcatggtgcctgacacctgtaatcctagcactttgggaggccgaggtgggcggatcacaaagtcaggagatcgagaccatcctgtctaatgtggtgaaaccctgtatctacaaaaaatacaagaaattagccgggcgtggtggcaggtgcctgtagtcccagctacttggaaggctgaagcaggagacccgggaggcagagcttgcagtgagccgagattgcacccctgcactccagcctgggcgacagaatgagactccgtctcaaaaaaaaaaatccattagcatagagaagcacaaaaggggtagaatctactaacaggtttcaaaaagaaggaagatgggactgtggttgttgaatttatgtgtaagggatttaaatgtaattttcaaaatgtagaaaggaaagggaaggatcatgagagtcacatcaagtgaaggaaagaggaaaggcttgctaaaatgcacaatgaaatgagtctatcaccaagatagagtaaggagggaaataagggtgccaacgagaagattaagagtggatggtaaggccgggcacgctggctcacgcctgtaatcccagcactttaggagactaaggcaggcggatcacctgaggtcaggagttcgagactagactggccaacacggcaaaaccccatctctactaaaaatacaaaaattggccgggcatggtggcgcacaactgtaaccccagctactcaggaggctgacacggaagaattgcttgaacccaggaggcagaggatgcagcgagccgagatcacgccactgcaccccagcctgggcaacaaagtgaaactctgtctcaaaaaaaaaaaaaaaaaagtgcatggtaatacacgaggcaaagtacaaacaagaggagcacatcacattggaattcatgctaattctaaataaagaagaaaagatttgtctccatcactcacttggacaggtctgatttggaacttgggcctgcaccatacacagctcttctccttgttccaacttgaagatgatatcaggtttggtgtgttggtaccctataaatagaaaaatcacagacaacctggaacaaacagcttgagattcagagattctgaagaacgggaaagatttggtttggaggtagcatgatgaagctgcctttttgcaatttggcaaagtaaagaccattcaactggcatactctgctgccaatagggaactaagaaaatctggccttaaaatctaagtccaaaatcactaagtatttcatagaagccctccagttttcagcaaccaagaagaagcctggagatcgagcacactcctcctcagggaggcagcacttacctagggacaccaggttgctatagttctccaacatcacactcctgtacaggcacttctgtgctgggtctagcagctgccactcctcccaggtaaaatccacaaacacatccatgaatgacaaaggtccctgaaatacaatatgctcatccaatttcaagttattttactaggtttgtggaaaactagctgtttagggtgtccattatttatgtttaactttgtgagaacaaaaattgtattgaaaacatccatcaatgtgcattaaatcagtcatctttctttctttttttttttttgttgagacagagtctcactctgctgcccaggatggagtgcagtggtgtgatcttggctcactgcaaggtatacctcctgggttcacgccattctcctgcctcagcctcccgagtagctgggactacaggcacccaccaccaagtccggctgatttttttgtatttttagtagagacggggtttcactgtgttagccaggatggtctcgatctcctgactttgtgatctgcccatctcggcctcccaaagtgctaggattacaggcgtgagccaccgcgcccggcctctttacagttttaagctatcctagaaaccacctatacaagagtgctcagatatgggaccttcagtactaaaggcaggacagtcaggcaaacaagttcgactgatcactcctacatctgcaatacagttaccaacctctatgtccaggaatataaacataaatgaaatacagtcctgccaccaagaagcttttagcactgcagaatgaagaacagttacatatgcaaatgcaactgaaagtcaaagaagctaagaaaaaagaacacagattacaacgtaggcacaaaggaagaaggaagcaatgctatttgacagtgtcaggtgaaatctgtgaaagggcactattggtacccagaagagaagacacattaaaactttatggactaaaaaggtaactgctgtaagtagcagccactctgtgggataaagacctaaacatgaaaatatacagatggtaaatgagcatacaaagcatgctcaataccatatgtcattagggaattgcaaatccagacaaaagtaagacaccactacacacctattagaatggataaaatccaaaaaactgaccaccaaatgctggagaggatgtggagcaataggaactcttattcattgctggtgggaatgaaaagtggtagagtcactttggaagccagtttggcaacttcttacaaatctaaacagtcttaccatataatccagcaactatgccccaggtatttatacaaatgaaaacttacgtcaaagcaaaaatagaagacacacatgacaagcatcagatatgaaaagaagttatcattactgaattcacagacaagaaaagactaactgctctgcgcacataaatttggttaagttagttgaaaaggacatattccttggaagacgcaaattaccaaacttactcaaaaacagataaacttgggccaggcgccatggctcacgcctgtaaccctagcactttgggaggccgaggcgggcagatcacaaagtcaggagaacgagaccatcctggctaacatggtgaaacttcgtctctactaaaaatacaaaaaaattagccgggcatggtggcacatgcctgtagtcctagctgctcaggaggctgaggcaggagactcacttgaacccaggaagcagaggttacagtgagccgaggtcgtgccactgtgctccagcctaggcgacagagcgagactccgtctcaaaaaaacaaacaaacagataagcttaattattacatatctattaaagaaataaaatttgtagttaacagcatacagattggaaagaaacaaaactgtccttttttacagagagagtaaggaaactgaggatgccaacgaaaagatgaagatgacacgactgtttatgaagaaaataccaaaaaacctaagaaagttcctagaactaactagtgaatgtagcaaggtcacaggatacatggtcaatacataaaagttggctatatgcctatataacagcaataaatcatttgattttgaaattaagaaactagctggatgccgtggctcacacctgtattcccagcattttaggaggccgaggcaggtgaatcacttgaggtcaggagtttgaaaccagcctggccaacatggtgaaaccctgtctctactacaaatacaaaaattagccgggtatggtagtgcgcacctgtagtcccagctactcgggaggctgaggtaggagaactgcttgaacccaggaggcagaggctgcagtgagcccagattgtgccactgcactccagcctgagtgacagagcaagactccatctcaaaaaaaaaaaaaaaaaaggaattaagacactgatactgtttacaacagcaacaacaaaacagaaagaacttacatataaatctaaaatatctgtgtaggatctgtatgctcaaaactataaacattgacttttaaaaatcaaagatctaaataatgggggaatcctgtgttcatggatttgaactcaatcccaaaggcactgtaaatcgaaaagtgaaaggtaaagtaataaagtaataaagaaaaagatctttatgagcttaggataagaaaacaataggacacaaaaatcattagcaataaaataaaaaaatttgcaatccagactcagtaaaagttagaaatatctgttcatcaaaagtaagcattaagagactaaaaaagcaagccaatattggaagtaaaagaagcacccgaggaaaaaatttgaatataggcttcatagtaagtttgttttaaactttaatgtgcatgaatcactgaatcttattaaaatgaagagtctgatattaacagcattgaggtgaactctgatattctgcatttctaacaagcttcccgaacaatacatattacgtaaacacacattttttaaaaaaaaggatacacataaaacacaaaataactttttggggatgggaaaggagatgaaaattgagtatgaggaaataagagaatatataaataaaggtagataaggaccttacatgaaccaatgatgataaaagggccatgggccaggcacagtggctcatgactgtcatcccagcacctcaggaggctgaggcaggaggactgcttgagcttaggagttgatgaccagcctgagccacacagggagacctcctctctactaaaaataaaaaacatcagccaggcatggtggcacttgcctgctgtcccagctactcaagaggctgaggctggaggatcacttgagcctggagtttgaggctgcagtgagttatgattgcaccactgcgctccactctgggcaacagaccaagaccctgtctcaaaaaaaaaagtgggggggttttgaactgaactgaggagtgattaacttaaccctctgacctaaggatctccatccctctctgcaccaaaaaaaaaaaaggtaataaagaaaacactaggaataaacaaatgagaagctcacccaggacttggtgatttttggctgctcttgggaaataaacagccactctaggactttctctattctgcgactcttctgcttctgcctgggtgttccagggagaggttgcagaccaggagtcccttggcccaagatggattcctgaccttggagctttctgatcctatcccatgaactgtttcgttcttggagaggtgggacctgtggactcaagagcaaatttactttagcgagcattatttcctttggggaaaaggaaataggggtcacatcacataaatgtgagagaaacacgttagaaaacaaggcaggtttaacttcaggaaatgcagggttagaggcagaaaagaaatggcttcctgacaaagcttagcaccaagagttcaagtcaagttttgagcccttcatgataaaaatacaggtacgaccctcaaacagcaaagctagagaaaactgtcctggctcatcctagcctccaaacggacttcctgccacaaaccaaatggcgtcttaataggctggtttggtagggcagtaggaatacccacacaacattattatgagggaataaggaaccaaacgaggctctgacagacaataaaaacataaccaaaatatctgaccacataaaaaattgtaacataatatttcaaaatgaagtaaaagaaatcagaaaaacgaaactttgaaaggacagatatataaaaaataaaagagcctagaaagtagatgcttagaaatgtgaaatctggaaaatgtgaaatgagaaatatcagaataaataaataaattaggaaaaaaattcagaaatgaagattaaatttaggaggaacataaaaaagcgccaacgacctagaaggcggcacaggtgaaaagtggggaaagcctaaaaaaaaaggaataaaaaattagaaaaagaaacaatgaatgaaatgccatgaaaaggctgttcaccaaggcatttttataacccaaatatctgtaactacataactggttgaaaacactatgggccatccatacagccagtaaaaggtgataagagatagggaagagggagcgaacaacctctatgtaccactattggtataatacaatgatcaatatatactcttagtgataatgacaaggggaagaatagtacgtacagaaagctagcttttgtgttacaaaaaagaagtgggattgcaagtatacgtatacgcatgtgtgtgccatataaatgggatcatataatatctagtcttttgtgtctggcttctttcacttcgcataatgctttcaaggtttatgcttgtcatagcacatatcaatagtttgttctttttgttggtgaatagtattccatcacgtttcatcattcaccattaatggacattaagattattccctggaggctgggcgcagtggctcatgcctgtaatcccagaactttgagaggtcgaggcaggtgagttgcctgaactcaggagttcgagaccagcctgggcaacacagtaaaaccccgtctctactaaaatacaaaaaaaaaatcagccaggcgtggcagcgtacacctgtagccccagctacttgggaggctgaggcaggagaattgcttgaacctgggaagcagaggttgcagtgagtgccactgtactccagcctgggcaacagagtgagactccatctccaaaaaaaaaaaaaaagattattccctggagaccaacagcttatgtctcagagccttctctgtgtacactgggcacagtctacccgctccacattttactctacatttcagggtctaggatcctagaatctctgcctcaagaaatcctcaacctacatccagagactaaataaggtacacaggccaggaaaatgcatgtagagccagaatatctgggttcaagtcctggctctacattgaccaggggtgccacctggtctccaactagccctttctggacctcagtacccttacccatcaaaggagaaaaacagtattcaccacctggggctagggctactgtgaagttttaaggtgataatacctaataaatgatttagcacagaacctcatacgtagtagacactgagcattaacatttggttgaaacggcaaaagaaaacaaaacaaaacataaaaccaggaatacttaatgaaaataaaccacactacaaaatgacaatcaacaagataaaaagcatatgctggttcttagaaaagaggactccaccttcaaacatcccccaactctgaccagtgtctccatttctaccacactacacaaaatccctgctacctcttgtctgaacgtggtcacctagtcagtctctggcttccccctctttctgtgcctactcttgcccacctacaacctgtcccccactcagcactcagaagggtctttggaaaccctaagcagctcacgttgctccctgtcttagcgccacacactctcccgggccccatggcttcccagcctgatctggcctctgcacctgtgttcatctgctctcctctctctcactccctacccccagtcacaaagtccttccttccaggttacctgatctggcctctgcacctctgttcatctgctctcctctctctcactccctgatctggcctctgcacctgtgttcatctgctctcctctctctcactccctaccccagtcacaaagtccttccttccaggttaccaaggcatcaaacttctcttgcctcgcagccttggccctggctgttcccatcctggatgttcttctacctgctcttcccaaggctggcttgctattgtaactcagacttagcttagacgtcacttcctcagtgggggccttccctgagcacccaagctaaagtagccaccacacattctttgtttttttttttttttttgagacagagtctcactctgtcgccagattggagtgcagtggcgtgatcttggctcactgcaacctcctactcctggggttcaagcgatttttctgcctcagcctcccgtgtagctgggattacaggtgcccaccatcacgcccagctaattttcatatttttagtagagacgaggtttcgccatgttggccaggctggtctcgaactcctgacctcagatgatctgcccaccttggcctcccaaagtgctgggactacaggcgtgacccaccacacacaagccatcagcactaaattccatttaggtttttatgactgctacggtttcaatgattgcatccctccaaaattcatgttgaaacttaacccccattgtgatggtattaagaggtggggccaattagctgggcatggtggtgcgcacctgtaatcccagctactcaggaggctgaggcaagagaaccacttgaactcgggaagcagacgttgtggtgagcagagatagccactgcactccagcctggaagacagagcgagactcagtctcaaaaaaataaacaaataaataaataaataaagaggtgcggccttttaatagtgattaagtcatgacggctctccttcaggaatgggattaataccctcttaaagaggtttcagagagctgcctggccctttcatctctttggccatgtgaggacacagcattcttccctttttgcccccttccaccatgtaaggatgtagcaagaaagtgccatcttgaaagcagagagcagagccgggtgcggtggctcacgcctgtaatcccagcactttgggaggctgagacaggtggatcatgaggtcaggagatcgaggtcattgtggccaacacaatgaaaccacgtctctactaaaaatacaaaaaaaaaattagctgggcgtggtggcacacgcctgtagtcctatttgggaggctgaggcaggggaatcacttgaacccgggaggcagaggttgcagtgagccaagatcgcgccaccgcactccagcctggggacagagagagactgtctccaaaaaaaaaaagaaaacaagaaagcaggcctcatcagataccaaattcaccagcaccttgatcttcaacttgtcagcctccagaattgtgagaaagtagtatctgttataagttcctcagtctgtgatattttgttacagtagcacaaacagactaagacaatgatctaatattacttgatctccctcatacatgtcacttgacaagcatttttgaggtttccatttctttaagtgtgaattacatgtctctattttgtcttacttttcttgggttccatctcagtcttcaacacctcttcccctgctttctcttgtcatttccctgaccactgtcctcagttctcttcttagggtacacattctccctgagctactttggccacacctaatttgcaacctctacctagaggagccaatccatacaaaactgaaatcttccccctctaccaatcacaattctgacagtcttcccttactcagcaaatggtgacactcccaaccaggcccacagagtagaactccagttgtcatccctggcttttctgcctctcttagcactgcacccaactagttatgaaatctaatttcttctgcctctttacctcctctcctttttttttttttgagacagagtcttgctctgtcacccaggctggagtgcagtggcgcgatctcggctgactgcaacctctgcctcctgggttcaagcgattctcctgtctcagcctcccgagtaacagggattacaggtgggagccactgcacccagccacctcctctcctttctcaaaaccactaatttacttaaacccttatattctcttacctgctgcagactagactgttctaccctcaaatccgttgtgaaaacacttcaataagtaaactccttcccctataccaacagtccccaaccagggactcgttttgtggaggacaatttttccatggacgggcagtcgggtgcggcgatggcttctggatgaaactgttccacttcagatcatcaggcattagagtcccataagaagtgcgcaacctagatctttcgcatgcgcagttcacaatagggtttgtgctatgaaaagctaatgcagcctctgataggaggcggggctccggcagtcatgctcactaaaccgccactcgcctcctgccatgcaccccagttcctaacagaccacagactggtaccagtctgaagcgtgggggttggggaccacctgccctatgtgatacaatccaagtttttaatggggtcctcaaagccctctatgatcttaggcctacggctctagcctcattttttaatataactctactatcaccattaaactcaacattttagcaaccctaaagtgcccaaagttcaccacatgaggtcatttcaagcctctcaaatttgcacgttacttctttttcctaggctggttttaatcctttgtctactttaggtttgtcatctttcaaacctaaggttaagaatctcttaatcattgaagcatttgggagtaaggggttagggggtgtccttacttccaaaactgacccattcctgcatgtctccgtgtatttccacagcctgctcccagagcactcattaacttgtcattgtctttcttatccaccattcctagaccactgttcttcaagacagggatgataagcaacccatctttgcatttttagcacctgccccagggtccagcaaacaaaatacaataaaaaaaaatgttgaacaagtgaataaaaaagtttgtaatttccaaaataaggtttaaagatcccagatacagaaggccctcagtaaataaaggctgaaaaaactgaaagatgtgtgagtatcccttgtttaactccaaagttcagcgtacaaagttgttagaaaagagattgatgaaaggaggaaaaaaggaagtcggatgacaagaagcatttctggaaagtctaacatgctataaatgacgatccagttgcctaaaagagcggtggggtgagaaagctcctggcaaattcagactggagtagatggagtgcgcacacgttggcattcagggagagcttttcaagaatgaaagaaaacccctactcacccaaatagaagctgtccggaccctggtggccatccctacggtcagttttgtgtgcctcgctggaagtgacaggacgcgagggatgctagaagagagagcacagtgaagaaagaggtcacccagcagtccccaaacccagagggggagggtccgaggcaccagggctgcctgccattctcggagctgaggctccttccctcccacagcacgggattcaccatctccacaccctcaccaacacacaggttagggtcaggcaaccgccccgggtcagcagcaggagagagctaaggcagattagttctgtcccgtcccgccgccttgaaaccggaggaattccgcacctccggctcctccaaaccctgaaggggcagcagaatagagtccagggtactgcctccacctccagatctgcagccagaagggttcgcaaccactccagactcggctggcccgttgaccacgacgggcgatgaacgctatctgaggaacaaggatctcgccatcggcgcggaacaa

SEQ ID NO: 1727 - DNA, 302 bp, Homo sapiens
ttttgatttttttttccttttgagacggagtctcgctctgtcgcccaggctggagtgcagtggcgcgatctgggctcactgcaagctccgcctcccgggttcacgccattctcctgcctcagcctcccaagtagctgggactacaggggcccgccaccacgcctggctacttttttgtattttttagtagagacggggtttcgccgtgttagccaggatggtcttaatctcctgatctcgtgatctgcccgcctcggcctcccaaagtgctgggattacaggcgtgagccaccgcacccggc

SEQ ID NO: 1728 - DNA, 6426 bp, Homo sapiens
gtcgcgcgaggttttggtttgtgaggatcggcgagtggcgcccaccatctctgcttgctgaaaagctgcagaggccgccaggagcccacggtgagcgggtctgaggaggacgggaaacagccccgagggaggcgggtgtggctactgctggtactggggtcctcatgccgatccccgagcttggctctgtagcgtcgagatgcggcgctggcagaggcctggaacgctggccgcaggctcccacccccctcgtttccctgtacccagggcagcctgtggcccactcagagtcggatactgacacacattcgcatgttaacttcgaagcccacaaaaagttttaactgtccacactccagaatcttctatcaacagaacatgcccctcggtcgctccagccccttgtctttgacccggatgcggaaaccccaaccctacccctcagcttgtcagtttccacgttttcagttggtccctgaaaatcagttggtgatcagttattttcgcctgccatagtgtacaccagtcttgaaacttgttactgtcgtagagcaaccaaaaatttgagaataccgaattgtattccctacccgtccccaggatgtcccattttggaaaatatggagccctgcgatctggattggctcataagaatgttaaatctaaaaagactgatcgtatccgtcatgcacctaatgtgtgtccagtgtttaacatagtttcctatgtacaggattggagatgtcgaaagatttcttgacctcttaacattgttcattatattcttttctttagattctctgaacttttactccactgtcataatttaattgtcaaggttcataggataacattcgatgtccctgccattagtcaactatgttgggagtgtgatttgttctccaatgtggcttgttatttatgtttcatctccacttagctttccccataggaagacacttccatagggagtgttttgtgttttgtagggtgacctctgttgtagttctatttccagatgatttccctttcgcagattgtcagctgtgcagatcagacctttttgcttaagtccttttgtttgatacgctaatcctattaagtatccactgtaagggacatttactgccgatacaatgacagtatcatgattttagagaattagattccacaattacaagggttaactatttacttagtatgaatcactgcttttgttaccctttcttggacagaaaccatccatgaatttagcagcattacttgtgtaggtttacattgtgttttcttttaaagtacttctctttacactcataaatatttctccttactggactccctgttaacttccaagatgccttttctggcgtctcctgacagctgtttctctgacaccttcagcttcctctaccttcctgaatggctttctggattcactaagaagagtcattggagggaggggcagtgcactggctttatagtgttttgtctgatgctgttgcagtaccctaagacttacagcaaactgcagatatggagttggaacggaagttgtttttaaggtctatgagtatatgcacttttatgtgtttgtttatatgctttttgaatatctctgatccaactgttggcagctctttgtatttcaggtgttgtctttaatgcataaatattgatgattcactcttgaaaggcaaaagacttacttcctaatgatgaactaattaaatgacccagaatgagagttggaactagtttagaaatgaaattgttttgtttccttatactataacatttggcacttgaagtatttgggacatgttatgaagttgatggattcttttaatatggtaatgttttctttctcatcacccactccaaacacctttataaaactgaatgagtatcttgtatttaggggaaaaatagtagtagggaggcatcaaaatatttctgataactattttcaaagtctgttcaactttcattacttcagtcatagaaactcttgttctaatattaagtagcataggaggaaaaacatgctgaggtcttacagtgtttaatggatttcttttatataactcattcctatctgtactacataactcattcttatctgtactgtatggatttcagggatcttaactgtttagaattccaactttcttttctgcctataacactctgtccactgtcttccttagtttccttttctgtttcctgtcctgtgatgtattctatggattagctgaaattatagttttctcagtccactttttcatcactcattccgtggatgattctacctcctttttgcatttctctgtatgcctgctatctcgcctttgtgagattgataataagcaataactaatgaacggttattgatatagccttcaaaacagatgggtcagaggttgtttgtaggacttatggtcaataaagttattatcgttaatgttttttttctttaccttcagcacctgagacttttacctttacccagaaaggaataaaagaggtcagatgatgacagctgtgtccttaacaaccaggccccaggtgagctgtttttttctatctctgtacatatccctgtgtgtatatacatatgtgtttattagatacatacataaaaatatctatattacacatttacatatatataacatacttttatatatgtgtgtatgtgtacacacacacatttctcattgaggtttaacttacacaacacaagtcttaacagtatagctcactttttagaactatgtacacttgtatgacctcactcatagaaacacatagaacattattagcaccccaaaaggccccttcatactgcctcccaagcaatccactgctcatcccaaagttaaccactattctgacctctgttaccataggaaagttttgtttgttcttgaacttcgtataagtggaatcattaaacatgcattcttttgtatctgccttcttttgctcaacgttatgtctgtgaacttcactgacgttgttgcacacagcagtgatttgttctttttcactactgagtagtttttcattttgtgataatagcacattttattcattctattgtggatggacttttggttgttcccattttgggctaccatgaataagaatgcagtgaacattcttatctttttgtggacatagatgcttctttctcttgggtatgtctctgtgagtaaaattttagctcatagggtatatatacatttggttagtttagtagatactgcccaacaattttccaaaatgattattccaatttatatttctgtcagccgtgtacagttgctccacatccttaccattacttgttgtcactcgtttgcagtatctcattggggtttaaaaaatcttctcatctctagtaagcagtgatgctgagcaccatttcataggtttattggcatatcctcttatgtgaactccctgttcagatattttttcgtattttttattacactgtacctttttttctcctaagttgtattgtttcttatttattgtaagtcctttgtcagacatatgtgttattaagtaacttctcccaatcagtggcttgcattttcactctcctaatggtatcttttgattatagattttactttcaatgaagtccagtatatcagtttgttttgtataagaaatcttttcttactcagacatcatcaagatgttcttctgtgttttcttctagaagatttattgttttacctttatacttaggtgtgtgattcatctcaaattaaaggtgtgaggcatgggtcaaagttctttttccccccatatacatatccaattgattcaggattatgtattgaaaaatctgtcttttacccactgaattgctctagttactttgtcatacatttggtgaacatatatgtctgtgtctgtttttaaaatccctattcagttctattagttgaattttctgtctgaaccagtattccatgacactcactgttggtgagttacatggaattttgcaacacaacgtaacatggagggcttttctccaaggtaattaaaaatacataaaaatggtaattgataaaacattctttggcacttggctcataggttcccttaatctcatactccatgttaagaccatttccactagagctctatttctgaaatacagagcttgactccagggcttaaaaacttgaaatagacacctttttaggcctatcttgagccttatgcaccaagttggtctagaccctagcctttctcaagtaagcagtattttcctgcgtttctctaacctcactacctctgcatgaagacaggctgcgggtgggagttcattgactgatcagagagctttgtgcttggggtagtgggcaaggagataggcaagaacgaaggattagaatgaaagtagaattggaaaatggagtaatatgagtaacccaaataatcactgggatatatacaaattagggaggggcttagagctaagctgacagctatgttcgggggtcagttctccttccacaagtgcacttctgtgatcgggcccaagcccagcttctatgcagcagcttcagcgtctgtggaggtcacatgtttagaagctcatagcggaggtgtacttgtttctcactgggaaaatatgctgaactctgactggctactttaattctgcatcttcttcctccacacctaaattttacacaaaaactctgtaggcacgtgaaggacccaatactgaatacgtatcatttgtagatgcccttctcaggtctctcattggcagatttgaccatcaccaaagtactgaggtctgggaaagtaggaacttgtcgtttcaggaatcagtggcttttgaggacgtggctgtgtacttcactacgaaggaatgggccatcatggtgcctgccgagagggccttgtacagggatgtgatgctggagaactatgaggctgtggcctttgtaggtaaggcctctctgctgctggtttctgcttgggccctcaggttgaagggctcttttataattattagctgaccccaaatagcgatgtcaaaggttgccaggtatagaaagccctggtgtctattgacttgcgaaaggctttccttctttttctagcgtaaaagctaccctccttccctacctgcctcagaggtgattctgagtacagtagggcttgagctatatcttgatacccttagcctagtattgaacctccaatttatcttaagagaatgcagccactttgtctccctctgggagttactcctaggagccatttgtctttttcccatagtgagagattttcatcctctgacaaagaaggtaaaaaatcttgttgccctttaaatagaaatctgccttccagggtgtttcaggcttccttggaagaaccatcctgactcttcttcccaggatccctcccagtacctctttagggtacctctcgtatagctcacccgggaattactctcctcacctcccttgcttgttcttgtagccacaggcttaaatttgacccctatgactatgctcattattgtgttatgttttcttcttttcgagcagtgccacccacttccaaaccagctttggtctctcatctggagcaagggaaagagtcctgtttcacccagccacagggagtcctaagcaggaatgactggagagcaggctggataggtgagttaagcaagagggttcttctccagctttgtctcttcctttgccttcatttcatcaaaatgaaaggtgtgtgttctctgtgcccagcatcatggagtacactgggatcctcgatcacattttttctgaccggtgtgttattcatagcttcccatccctttaaagcgtagtacacaacactcttcttctgtatttcacacactgggatgcttttatcccttggggatatgtagaacagtttttctaaatactttactggttatttgtgatcatttttttccagtttctccagttttacaaaattgataaacttggtgcagtattatcttgttcactgaccaacagaacaagtagaaaaatttatttttgtttttcatgagaactaatatattaacaattttaaataattttttatactgaaatattttaagcttacagttgttatgattttcctcctctctaggatacttggaactaagaagatatacttacttagctaaagcagtgttacgtagaatagtatcaaaaatttttcgaaatcgtcaatgctgggaagacaggagaaaagcttaattcttgacatttaaataccagttttccaagtaaggagttgatgtaagagccaccttaaacgatgtcaaatacacattttctttttctgtagactggtagatttaatgtttttcattcattaaaataactcattttgatgtacaaa

SEQ ID NO: 1729 - DNA, 6427 bp, Homo sapiens
tttgtacatcaaaatgagttattttaatgaatgaaaaacattaaatctaccagtctacagaaaaagaaaatgtgtatttgacatcgtttaaggtggctcttacatcaactccttacttggaaaactggtatttaaatgtcaagaattaagcttttctcctgtcttcccagcattgacgatttcgaaaaatttttgatactattctacgtaacactgctttagctaagtaagtatatcttcttagttccaagtatcctagagaggaggaaaatcataacaactgtaagcttaaaatatttcagtataaaaaattatttaaaattgttaatatattagttctcatgaaaaacaaaaataaatttttctacttgttctgttggtcagtgaacaagataatactgcaccaagtttatcaattttgtaaaactggagaaactggaaaaaaatgatcacaaataaccagtaaagtatttagaaaaactgttctacatatccccaagggataaaagcatcccagtgtgtgaaatacagaagaagagtgttgtgtactacgctttaaagggatgggaagctatgaataacacaccggtcagaaaaaatgtgatcgaggatcccagtgtactccatgatgctgggcacagagaacacacacctttcattttgatgaaatgaaggcaaaggaagagacaaagctggagaagaaccttcttgcttaactcacctatccagcctgctctccagtcattcctgcttaggatttcctgtggctgggtgaaacagcactctttcccttgctccagatgagagaccaaagctggtttggaagtgggtggcactgctcgaaaagaagaaaacataacacaataatgagcatagtcataggggtcaaatttaagcctgtggctacaagaacaagcaagggaggtgaggagagtaattcccgggtgagctatacgagaggtaccctaaagaggtactgggagggatcctgggaagaagagtcaggatggttcttccaaggaagcctgaaacaccctggaaggcagatttctatttaaagggcaacaagattttttaccttctttgtcagaggatgaaaatctctcactatgggaaaaagacaaatggctcctaggagtaactcccagagggagacaaagtggctgcattctcttaagataaattggaggttcaatactaggctaagggtatcaagatatagctcaagccctactgtactcagaatcacctctgaggcaggtagggaaggagggtagcttttacgctagaaaaagaaggaaagcctttcgcaagtcaatagacaccagggctttctatacctggcaacctttgacatcgctatttggggtcagctaataattataaaagagcccttcaacctgagggcccaagcagaaaccagcagcagagaggccttacctacaaaggccacagcctcatagttctccagcatcacatccctgtacaaggccctctcggcaggcaccatgatggcccattccttcgtagtgaagtacacagccacgtcctcaaaagccactgattcctgaaacgacaagttcctactttcccagacctcagtactttggtgatggtcaaatctgccaatgagagacctgagaagggcatctacaaatgatacgtattcagtattgggtccttcacgtgcctacagagtttttgtgtaaaatttaggtgtggaggaagaagatgcagaattaaagtagccagtcagagttcagcatattttcccagtgagaaacaagtacacctccgctatgagcttctaaacatgtgacctccacagacgctgaagctgctgcatagaagctgggcttgggcccgatcacagaagtgcacttgtggaaggagaactgacccccgaacatagctgtcagcttagctctaagcccctccctaatttgtatatatcccagtgattatttgggttactcatattactccattttccaattctactttcattctaatccttctttcttgcctatctccttgcccactaccccaagcacaaagctctctgatcagtcaatgaactcccacccgcagcctgtcttcatgcagaggtagtgaggttagagaaacgcaggaaaatactgcttacttgagaaaggctagggtctagaccaacttggtgcataaggctcaagataggcctaaaaaggtgtctatttcaagtttttaagccctggagtcaagctctgtatttcagaaatagagctctagtggaaatggtcttaacatggagtatgagattaagggaacctatgagccaagtgccaaagaatgttttatcaattaccatttttatgtatttttaattaccttggagaaaagccctccatgttacgttgtgttgcaaaattccatgtaactcaccaacagtgagtgtcatggaatactggttcagacagaaaattcaactaatagaactgaatagggattttaaaaacagacacagacatatatgttcaccaaatgtatgacaaagtaactagagcaattcagtgggtaaaagacagatttttcaatacataatcctgaatcaattggatatgtatatggggggaaaaagaactttgacccatgcctcacacctttaatttgagatgaatcacacacctaagtataaaggtaaaacaataaatcttctagaagaaaacacagaagaacatcttgatgatgtctgagtaagaaaagatttcttatacaaaacaaactgatatactggacttcattgaaagtaaaatctataatcaaaagataccattaggagagtgaaaatgcaagccactgattgggagaagttacttaataacacatatgtctgacaaaggacttacaataaataagaaacaatacaacttaggagaaaaaaaggtacagtgtaataaaaaatacgaaaaaatatctgaacagggagttcacataagaggatatgccaataaacctatgaaatggtgctcagcatcactgcttactagagatgagaagattttttaaaccccaatgagatactgcaaacgagtgacaacaagtaatggtaaggatgtggagcaactgtacacggctgacagaaatataaattggaataatcattttggaaaattgttgggcagtatctactaaactaaccaaatgtatatataccctatgagctaaaattttactcacagagacatacccaagagaaataagcatctatgtccacaaaaagataagaatgttcactgcattcttattcatggtagcccaaaatgggaacaaccaaaagtccatccacaatagaatgaataaaatgtgctattatcacaaaatgaaaaactactcagtagtgaaaaagaacaaatcactgctgtgtgcaacaacgtcagtgaagttcacagacataacgttgagcaaaagaaggcagatacaaaagaatgcatgtttaatgattccacttatacgaagttcaagaacaaacaaaactttcctatggtaacagaggtcagaatagtggttaactttgggatgagcagtggattgcttgggaggcagtatgaaggggccttttggggtgctaataatgttctatgtgtttctatgagtgaggtcatacaagtgtacatagttctaaaaagtgagctatactgttaagacttgtgttgtgtaagttaaacctcaatgagaaatgtgtgtgtgtacacatacacacatatataaaagtatgttatatatatgtaaatgtgtaatatagatatttttatgtatgtatctaataaacacatatgtatatacacacagggatatgtacagagatagaaaaaaacagctcacctggggcctggttgttaaggacacagctgtcatcatctgacctcttttattcctttctgggtaaaggtaaaagtctcaggtgctgaaggtaaagaaaaaaaacattaacgataataactttattgaccataagtcctacaaacaacctctgacccatctgttttgaaggctatatcaataaccgttcattagttattgcttattatcaatctcacaaaggcgagatagcaggcatacagagaaatgcaaaaaggaggtagaatcatccacggaatgagtgatgaaaaagtggactgagaaaactataatttcagctaatccatagaatacatcacaggacaggaaacagaaaaggaaactaaggtagacagtggacagagtgttataggcagaaaagaaagttggaattctaaacagttaagatccctgaaatccatacagtacagataagaatgagttatgtagtacagataggaatgagttatataaaagaaatccattaaacactgtaagacctcagcatgtttttcctcctatgctacttaatattagaacaagagtttctatgactgaagtaatgaaagttgaacagactttgaaaatagttatcagaaatattttgatgcctccctactactatttttcccctaaatacaagatactcattcagttttataaaggtgtttggagtgggtgatgagaaagaaaacattaccatattaaaagaatccatcaacttcataacatgtcccaaatacttcaagttccaaatgttatagtataaggaaacaaaacaatttcatttctaaactagttccaactctcattctgggtcatttaattagttcatcattaggaagtaagtcttttgcctttcaagagtgaatcatcaatatttatgcattaaagacaacacctgaaatacaaagagctgccaacagttggatcagagatattcaaaaagcatataaacaaacacataaaagtgcatatactcatagaccttaaaaacaacttccgttccaactccatatctgcagtttgctgtaagtcttagggtactgcaacagcatcagacaaaacactataaagccagtgcactgcccctccctccaatgactcttcttagtgaatccagaaagccattcaggaaggtagaggaagctgaaggtgtcagagaaacagctgtcaggagacgccagaaaaggcatcttggaagttaacagggagtccagtaaggagaaatatttatgagtgtaaagagaagtactttaaaagaaaacacaatgtaaacctacacaagtaatgctgctaaattcatggatggtttctgtccaagaaagggtaacaaaagcagtgattcatactaagtaaatagttaacccttgtaattgtggaatctaattctctaaaatcatgatactgtcattgtatcggcagtaaatgtcccttacagtggatacttaataggattagcgtatcaaacaaaaggacttaagcaaaaaggtctgatctgcacagctgacaatctgcgaaagggaaatcatctggaaatagaactacaacagaggtcaccctacagaacacaaaacactccctatggaagtgtcttcctatggggaaagctaagtggagatgaaacataaataacaagccacattggagaacaaatcacactcccaacatagttgactaatggcagggacatcgaatgttatcctatgaaccttgacaattaaattatgacagtggagtaaaagttcagagaatctaaagaaaagaatataatgaacaatgttaagaggtcaagaaatctttcgacatctccaatcctgtacataggaaactatgttaaacactggacacacattaggtgcatgacggatacgatcagtctttttagatttaacattcttatgagccaatccagatcgcagggctccatattttccaaaatgggacatcctggggacgggtagggaatacaattcggtattctcaaatttttggttgctctacgacagtaacaagtttcaagactggtgtacactatggcaggcgaaaataactgatcaccaactgattttcagggaccaactgaaaacgtggaaactgacaagctgaggggtagggttggggtttccgcatccgggtcaaagacaagggggctggagcgaccgaggggcatgttctgttgatagaagattctggagtgtggacagttaaaactttttgtgggcttcgaagttaacatgcgaatgtgtgtcagtatccgactctgagtgggccacaggctgccctgggtacagggaaacgaggggggtgggagcctgcggccagcgttccaggcctctgccagcgccgcatctcgacgctacagagccaagctcggggatcggcatgaggaccccagtaccagcagtagccacacccgcctccctcggggctgtttcccgtcctcctcagacccgctcaccgtgggctcctggcggcctctgcagcttttcagcaagcagagatggtgggcgccactcgccgatcctcacaaaccaaaacctcgcgcgac

SEQ ID NO: 1730 - DNA, 447 bp, Homo sapiens
tactttttctttcggtagatctttattgtgaaggcttgagttgatctaatcaggagttaaactgtgtttaggtgtttttgttgctatggttatccacaggcttcaaattcttctagtattaccttaagtttagtgtgtgggatggtttgctaaaggagattttctcaatgtttgcaccactcttacctttaggccttcccttcattcctgtacctcagagaggggtctttctccatgtttttatccttcttttagcagtagattgctgttcttattgactcagcatttgatattttggtggtggtagaagggatggcattttctgttgtgattcagctttaatcttaggtaggcactgtgtctctgagacttaagggtggggtctattaagtgatgttgccctatcctcagctgtaggacacctccatggtctggaaccaggatgca

SEQ ID NO: 1731 - DNA, 6165 bp, Homo sapiens
gtcctcccaagatggcggagacagagtgaagaaactgtgttccccccttgggttgctatcggtgagttcctacttcacccccagcccgccatcccggtctctctagagcctgggccatcagagggcaggctccttggagttccagcacgggtcggggcgcaggtggaaggcttgggctaggcagccccggggtggcctgggccacaacctctgctgtggaaattcgcgggagtgggagctgggcagagggcagggcggcagaagccgaggagggactggctttggttgtcactctcggatgccgcctcgcgtagagagtgggaagggagaaggtgtggcctccttagcgcgagtgatagaacctttgacagcaagccatggccgggcgcattcccggctttctgggcagccacctctcgttttggagaaactgcactggggaaactaacaggttttggtgacttgagagcagtttttaaaaactcgtactgttctgcccctatctgtcccaagagatcatgtcttagtggtttaaaaaatttttttgtaacataagtatgtctactgagcttgaaaatctgagggttcaacagatgtgaaagcgtcaggttttgctgtgctttttgcaggtggtagaagtgttgccattcaccgtcacttattgatgtgtccaaaggattgtgttagttgatcaaggtaaccaaagatagaaaggcactcatcccttcattcttaaccatgtatgtttgataaggattttcaagggggctaaaattgtttaagttatgtcctctgtcccttccctcactgaacgttgatgagaacttacggttactgatttactgtttctttttgtcttttagatcaagggtaaaattccattctgatatcaaaatgcagtattcgcaccactgtgagcaccttttagagagactgaacaaacagcgggaagcaggttttctctgtgactgtaccatagtgattggggaattccagtttaaagctcataggaatgtgctggcctcctttagtgagtattttggtgcgatctacagaagcacttctgagaacaatgtctttcttgatcagagtcaggtgaaggctgatggatttcagaaactgttggagtttatatacacaggaactttaaatcttgacaggtaaagtacacattttattttcagttataaaagctagtcagtagtcttcacagcaaaagtagatttgtattttttccattcattctctgaactcaaattcttcacctatttatgcacacaatgtttgtttttataaagaaatcagtatcactgatttaggatgagcaggcaatatttttcataagcacagataataaacagtaagatttctgacacgtttatttactgaaacaaagcctgtgatttcacttatgtaaacttgaacattaaacacaatgaatttattttattttatttttgagacgggctcaccgtcacccaggctggagtgcagtggggcaatctcggctcactgcaacctctgcctcccgggttcaagcgattctcccacctcagcctccctagtaactgggactacaggtgtgcactaccacacctggctaatttttgtattttttggtagagacagggtttcaccatgctggccaggctgcaaacaaaaaattctaagttacttccagtttcccattgctttttggtccttgaattcctctggtcttctgtctccctcattctgactcctgttatctctattaacctaccagtactaatactgaagtaaggtcagagatgctagaatgattctctaagatgcttactgatgtcactgcattaacaagaagtgggttctgaggaatctgataatgtaggcactgtgtgtctcccctgtataacgaaccatataattagattaatatcaatacatttacagattgtaggggaaaaggtggagggaataaaagcaaagagaaactgattaaattacccctgtcttatttctgtctctcttatgaaagtgaacatgaatagactgttcataatcttctgacacaggaagattataggctttggaattagatctttcctgtcagtcgctatgtctccttgagcatgatgcaatctctctgggcctcagtttccccatctgtcaaaatgagatggtaataactaccttgaggctaaataaggttttacttgatccttattcacttcccactgaacgttaatttctttatttttcttctttaccctctcctccccctttaattccacatttctcggagaaaaaatagaaaaaacaaaaaagaaacacctgaaatactgctgcccactgataacccctgttaaccttttgatatatattaattaattcttttccagatctctgtagagatgtgcatgtatacattaagcaaaatctttccctcccttttatattgtaacttatcatggaaatatacttatttaaaaatctagaatcagggtgctcattaatccttttgacgaggaaacattcttgtgtaagaagtatccagtggggggaggggagggagagaaaagtaaactttcatgctattttggaattatttttaaattttggtataatgaaatcttcaagtgagttctttataagttgattaaaggaaaagagcagtgtgaattttggctggcctgcaatttaatggtttccctttctctcaattaactatgcaaaacaaaaaaatcttcatttgaatacacggtagagcacttttctttgagacttcatgcaaagaaccaatgtgaagaacagccaggtgttttgttcagtctcttttggtacatatctttcctggagactggggagctaattcctcgagttcagctagaaatgtaagagaggatttataccaaaatagaaaggcttacaacttagtgattaagaaaacaggtagaatatattaagttggctcaggggccagattaccttggtcaaatcttggttctaacattctgtgctcttggacaggttactttatttctttggacttctgatttttcacttgtgtgtaaaatgaggattataatagatttcataggcatgtcctgaggataatcttataaagcatttaggcatgtacctggcaatatgtaattaaatgaccttcagtgactgttcagaggatgttatctaatacttgtaaacaaaagcaaatctgttattgaagtattgattggtgctcttaactgtgactgagattatagccatctatgaaatagtttgtatgaattaccatttcaatgttgaacaaatttttttttttttttttttttttttttgagatggagtctcactctgtcacccaggctggagtgcaatggcgtgatctcggctcactgcaacctccacctcccaggttcaagggattctcctgcctcagcctcccgagtagctggaattacaggcacccgccatcatgcccagctaatttttgtattttgtagatacggggttttaccatgttggccaggctggtcttgaactcctgacctcaggtgatgcgcccaccttggccttacaggcataagcaactgcacccggccttgaacaattaatgtatgacttcctgctaacttatattggtcttaaaggctacctgaccttgttatctgtttggcggtttattttatggagcactaaacacaattagagaccaaaagatcttttttagtggcccagcccaaaagacaatttttagaaagctgttgtgatgctaaattaaataaggggaaacatacaggtggcacttgaggcaaagcaagtttaattagaagatgatgagaacatgggtagagatttgtagatactgtagcatacttttagagatcttagaggttcatgacactagttattttttattttatttcaaattttagtcctttaaaatagtatcaccagcactatatttacattgtcagctatgattaaaacccttttctggcttatacttacaacagagagggaaagagatcatcttcccaaagataaaccatatttagggaaaaaaatcaagtaggaagattatttgagggtaaggggtgtgtgtgtgtgtgtgtgtgtttccatcctcaaatacttataacagtcatgtttttagtgttaacaccaactcaactctaattttacagctaagaaagttgaaccccccaaagatgctgacttaccctaattaagtcagccagtaatgccagagccagtgctagattaatcaaacaacctttcaccacattgtgaacttctgaagggcagagactatttacttattaatatcttagtaccacacatggtagatgcttagtaaacatttgactagaatattgaacaaggtggcttaagtctttctttgtaactctcacatcacgaacactccagctaatttgggttgagtatcaccaaaaaaggtgggagggttgctagagagagtttaacattctaaaaccttgttcctctaagtggattcctctaagcaacattggcatcaccaggaagtgtattaagaaatgcaggctgtgctggtggctcacgcttgtaatcctagcactttgggagcccaaggtgggaggatcacttgaggccaggagttcgagaccagcctgggcagcatagcaagaccctgcctctacaaaaaaaatagccaggcatggtagcacatgcttgtagtcccacttacttgggaagctgacgcaggagcccaggagttgaaggctgcggtgagttatcattataccagtgcactcctgcttgggcaacagaagaataccccatctcaaaacagaaaaaaaatgcagaatctcaggccccatcacagacctactgaatttgaatctacatttaacaagattcccgggtgattcacatgcacagcaaagtttgggaaacataattaaagtccctcacaggggagcaggagaaaatagtaggaaacaagtgtcattagactttccctcttgccaatccagaaaagttggttgctatctgaagaagcctcaggatgaatggaggaggtagtgagttaccatcagctatttttgtgttctagggttttaaaaaaaaagccagaaaatttaacatttaatttttctgcagtggttcactgtcagctgtgaatagccattatctttcatctcttgaagttctgtaaaattggagattttttacctaaacattattctgaatgaatttataaatctatttttctcttagttatgtctttttcagcattctgcttcattaggtctttaaaatacattgaagtatatatgcagctctgtttcgaaagtttttctttgatcagaatattgtcatgtagccttgtttccttgcagttggaatgttaaagaaattcatcaggctgctgactatctcaaagtggaagaggtggtcactaaatgcaaaataaagatggaagattttgcttttattgctaatccttcttctacagagatatctagtattactggaaacattgaattgaatcaacagacttgtcttcttactctgcgagattataataatcgagagaaatcagaagtatctacagatttgattcaggcaaatcctaaacaaggcgcgttagcgaaaaagtcatctcaaacgaaaaagaagaagaaggctttcaactccccgaaaacagggcagaataaaacagtgcaatatcccagtgacatcttagagaatgcatctgttgaattattcctagatgcaaataaactgcccacacctgtagtagaacaagttgcacaaataaatgataattcagaactcgagttgacatcagttgtggaaaatacttttccagcacaagatattgtgcacactgttacagtgaaacggaaacgtggaaaatcacagccaaactgtgctctgaaagaacactctatgtctaatatagccagcgtcaagagtccttatgaggcggagaactccggggaagagctggatcagaggtattccaaggccaagccaatgtgtaacacatgtgggaaagtgttttcagaagccagcagtttgagaaggcacatgagaatacataaaggagtcaaaccttacgtctgccacttatgtggaaaggcatttacccaatgtaaccagctgaaaacgcatgtaagaactcatacaggtgag

SEQ ID NO: 1732 - DNA, 803 bp, Homo sapiens
cttcgcttggaagaaagcgtgagatcacgctttgttttcttttgttgtttgttttgtttttttttctgagggaagccttagcttaatgtatgccggtccttcaaaagacatgatagcaatttgagagtctgaactgtaagtttttgttactttattcgttcaccaaatgtttttatggaagccttgccacgtggaacatgtgtcccgggttttaaaaaatgaatttgactcaccagctaacactgaaaaaataatgtacagcctagaaggaaagatcaaagtgtaaaagtggttagtcctgtcgcctcctgagcatttttgtattatatcacttggtttttcgtctgaagtggctgtaaataatcgtattaaaaatcttctggtccagacgcaggaaaaccttttccggtataaagcccaccttcctctaatgttgcgcatgcccactgtgcccagctgctccgctttcgtgcatcccagacttctgtcaccaggtaagggcatcttggaagctgagctacagttggctggggcacaaaaaaaccagggggtgccaagagttttcaggtacgtaagcgggaaaggggtgccaagtctcagctaaaaaatcccctatggcagagatccgagtacacatgcagcagtttccaccggtggggccccgaggaaggggaggatgatgggagaagacaagcaactacaagcccccgcacgcagtgcgcagctggcttcaggagagaggcccgcggtgctgtgctgccgggcctcggcgcagagccccggcagagcgccagacgctgact

SEQ ID NO: 1733 - DNA, 261 bp, Homo sapiens
cagagtctcactgtgtcgcccaggctggagtacagtggtgcgatctcggctcactgcaagctccgcctcccgggttcaagccattctgctgcctcagcctcccgagtagctgggattacaggtgcctgccaccaagtccggctaatttttttgtatttttagtagagactgggtttcaccatgttagccaggatggtctcgatctcctgaactcgtgatccgcccgcctccgccttccaaagtgctgggattataggcgtg

SEQ ID NO: 1734 - DNA, 6165 bp, Homo sapiens; identical to SEQ ID NO: 1731

SEQ ID NO: 1735 - DNA, 803 bp, Homo sapiens; identical to SEQ ID NO: 1732

SEQ ID NO: 1736 - DNA, 261 bp, Homo sapiens; identical to SEQ ID NO: 1733

SEQ ID NO: 1737 - DNA, 481 bp, Homo sapiens
gggctgtgctggcctcctgcagcccattcttccagcttttctacaaggagcgggaattggacaagagggatctggtgtgtattcacaatgaaattgtcacagccccagcctttgggctgcttctggactttatgtatgctggccagctgaccctgagaggggatacccctgtggaggatgtgctggcagctgccagctacttgcacatgaatgacatcgtcaaggtgtgtaagcggcggcttcaagcccgggccctggcagaggcagacagtaccaagaaggaggaggaaaccaactcacagcttcctagtttggagtttttgtctagtacttcccgtggcacccaaccttcgttggcatctgctgagacatcaggccactggggcaaaggggaatggaaaggctctgctgctccctcacctactgtccgtcctccagatgagccaccaatgtctagtggggctgacactacacagcctgg

SEQ ID NO: 1738 - DNA, 481 bp, Homo sapiens
ccaggctgtgtagtgtcagccccactagacattggtggctcatctggaggacggacagtaggtgagggagcagcagagcctttccattcccctttgccccagtggcctgatgtctcagcagatgccaacgaaggttgggtgccacgggaagtactagacaaaaactccaaactaggaagctgtgagttggtttcctcctccttcttggtactgtctgcctctgccagggcccgggcttgaagccgccgcttacacaccttgacgatgtcattcatgtgcaagtagctggcagctgccagcacatcctccacaggggtatcccctctcagggtcagctggccagcatacataaagtccagaagcagcccaaaggctggggctgtgacaatttcattgtgaatacacaccagatccctcttgtccaattcccgctccttgtagaaaagctggaagaatgggctgcaggaggccagcacagccc

SEQ ID NO: 1739 - DNA, 645 bp, Homo sapiens
gccactggtggggacctttttgggccccctttccttcgtggggtactatggagttcccagaacacagtcagcagctgctgcagagcctccgggagcagcggtcccagggtttcctttgtgactgcaccgtgatggtgggtagtacccagttcttggcccatcgggctgtgctggcctcctgcagcccattcttccagcttttctacaaggagcgggaattggacaagagggatctggtgtgtattcacaatgaaattgtcacagccccagcctttgggctgcttctggactttatgtatgctggccagctgaccctgagaggggatacccctgtggaggatgtgctggcagctgccagctacttgcacatgaatgacatcgtcaaggtgtgtaagcggcggcttcaagcccgggccctggcagaggcagacagtaccaagaaggaggaggaaaccaactcacagcttcctagtttggagtttttgtctagtacttcccgtggcacccaaccttcgttggcatctgctgagacatcaggccactggggcaaaggggaatggaaaggctctgctgctccctcacctactgtccgtcctccagatgagccaccaatgtctagtggggctgacactacacagcctggca

SEQ ID NO: 1740 - DNA, 6096 bp, Homo sapiens
aggcgcggtggctcacgcctgtaatcccagcactttgggaggctgaggcgggtggatcacaaggtcaggagatcgagaccatcctagctaacacagtgaaaccccatctctgctaaaaatacaaaaaattagccgggcgtggtggcgggcacctgtagtcccagctactcgggaggctgaggcaggagaatggcatgaacccgggaggcagagcttccagtgagccgagattgcgccactgcactccagcctgggcgacagagcgacacactgtctcaaaacaaacaaaacaaacaaatataaatatatatgaggccaggcaaggtggctcatgcctgtaatcacaacactttgggaggccaaagtgggtggatcacctgaggggtcagaactgcaatgagacaagatcaccccaccgcactccagcctgggcaacagagcaagacgcaaaaaaagaaaaataaatgaaaattaaattaaattaaaaattaaaaaggtcaggcttggtggctgacacctgtaatctcagcattttgggaggccaagctgggaggatcacgtgagcccaggagttcaagaccagcctgggcaacacagagtcccccttctctatttacaacatatacatacatatatttttatatgtatataatttatatatttatatttacatatatgtatatataaaaacatatatatattttttgagatggattctcctgcctcagcctcccaagtagctgggattacaggtgccaagctaatttttatatttttattattattatttatttattctttttttttttgagatggaatttcactcttgttgcccaggctggagtgcaatggcacgatctcggctcactacaacctccgccccccaagttcaagtgattctcccgtctcagcctcccaagtagctgagattacagacatgcgccaccacaccctgctaatttttgtacttttaatagagacagggtttctccatgttggtcaggctggtctcgaactctcgacctcaggtgatccacctgcctcggactcccaaagtgctgggattacaggcgtgagccactgtgcccggcccatttcttagttttaattcctatacagtaaatattgtatggcttgtaagaatgaacacagtgtcttgaagaggcatgatctcaagctaaggccaacatatcctgaatgtatgtagcacaagtttgttgtatagatgaactctccctaattctggttaggtctgatcggagggcctgactgcagaataaagtagagatgcttagggtggtgggtgaaggagtgaggattagggcaccgagtttactcctctagtaacactacctgggtcagacggggcagttatcagtgactcccaacttatagccttttcctctgggtgtgtagagactctcaaagatttcttcagtagacacggtttttgcttcttctctcctgtcctgggacattttatgatcctgaccccattcttacccttcctaccagcacctgctcagcacgctctggaaacaaagaacactctatcctctcactgtaaattgactgtagagtccaggctagggacaccacgacatcatccctgtagctgctagttctttcatgccatcactgagccgggagccccggaaacttagcttggaggagtggagcagtagggcatcttaaaatgtttttttgtttgtttgttttagatggagttttgctctgtctcccaggctggagtgcagtggcgctatcttggctcactgcaacctctgcctcctgggttcaagagattctcctgcctcagcctccctagaagctgggatttcaggcacgcgccaccatgcccagctgatttttgtatttttagtagagatggggtttcactatgttggccaggctgctcttgaactccggacctcaagtgatctgcccgtctcagcctcccaaactgctgggattaaaggcgtgagccaccgaacccggcaaatcttagaatttttgagaggaagggaccttcaagagacaaacgcagttcagggacgtggggctattgcccacagtcaccagttggttctctttttttgggggggtggggggatagggtcttactctgtcgcccaggctggagtgcagtggcacgatcttgactcactgcaacctccgcctcccgggttcaagtgattctcctgcttcagcctccccagtagctgggattacaggcgcgcgcccccaagacctgctaatttttgtatttttagtagagacggggtttcagcatgttggccaggctggtatcgaactcctgaccccaagtgatccgccctcctcggcctcccagagtcctgggattacaggcgtgaagcactgcgcctggcctagttggttctctttttccctgtcagcctgtagcgggagtggcttgctgtcagctcgggtccgacactgcagggttcccgacctccagcctcgccaggagagcgccgcgttcagcgactcggagccgggtacctcctgcctgctggattaggtagaaggagaagctcagccaatcctgagggctcggaggcaaggaaggcgggacgaagaggaaaagttgaggacaggagcgtcacccaatccaacgcctgactgcaaaagcgatggcggcgagcacccaattgtagacggcagttagagggaggatggttagtggagagcggaccaatccgtgacaggggagggcaatcttaagccaattaaagctgagaaggtgggaaggggcggagctcgccctgtggctgctcggtggtgggtgaggtatcagctttctccgctagttcccaaccctggtagtccttagtcccctggaatgcgtgagggagatgcttagggagttctcgaagtggggcgtagaggcatcgcctggtcaaggcctcctatcgttaccgatctatatttcatgtgagcacgttggaccctaccgggttgtcatcaagcaagccgagtttgcacttagggtaggcaccttctcggagagacagggctcatcgttacgggggtggggcctgttctaaggttaggccgaggtgggcggagctaatgggagagctttgggtgtgacctaggagaaagaagggcagtaacttaagcgattgttttggagtggcaaatgatagttaagggctgataaggttgctggggaggttacctgtcttaactcactgcccttttttctcagggagccactggtggggaccttttttgggccccctttccttcgtggggtactatggagttcccagaacacagtcagcagctgctgcagagcctccgggagcagcggtcccagggtttcctttgtgactgcaccgtgatggtgggtagtacccagttcttggcccatcgggctgtgctggcctcctgcagcccattcttccagcttttctacaaggagcgggaattggacaagagggatctggtgtgtattcacaatgaaattgtcacagccccagcctttgggctgcttctggactttatgtatgctggccagctgaccctgagaggggatacccctgtggaggatgtgctggcagctgccagctacttgcacatgaatgacatcgtcaaggtgtgtaagcggcggcttcaagcccgggccctggcagaggcagacagtaccaagaaggaggaggaaaccaactcacagcttcctagtttggagtttttgtctagtacttcccgtggcacccaaccttcgttggcatctgctgagacatcaggccactggggcaaaggggaatggaaaggctctgctgctccctcacctactgtccgtcctccagatgagccaccaatgtctagtggggctgacactacacagcctggcatggaggttgacgcaccacatctgcgggcacctcatccaccagtggctgatgtctctcttgccagccctagtagctccactgagaccattcctacaaactacttctcttctggcatctcagcagtttcattggagccactgccatctcttgatgtgggtcctgagagtctgagggtggtggaaccaaaggatcctggaggaccactgcaaggcttctatcccccagcctcagccccaacgtcagccccagcccctgtctcagctccagttccatcccaggctccagccccagctgaagctgagctggtccaggtgaaagttgaagctattgtgatctctgatgaagagactgatgtgtcagatgaacagcctcagggtcctgagagagctttcccatctggaggagcagtgtatggggcacagccctcccagccagaggcttttgaagacccaggggcagcaggactggaggaggtggggccaagtgaccacttcctgccaacagaccctcatctaccctaccatctgctgccaggtgcagggcagtatcatcgaggactggtgacctcacctctgcctgcacccgcatccctgcatgagccactttacctgtcttctgagtacgaagcagctccaggaagctttggggtttttactgaggatgttcccacctgcaagacatgtgggaagaccttctcatgctcttacacactacggcgacatgccacggtgcacacacgtgagcgaccctatgagtgccgctactgcctgcggagctacacgcagtcaggggacctctaccgccacatccgcaaggctcacaatgaggacctggccaaacgcagccaaccagatccagaagtgggaccccttctaggggtgcagcctcttcctggctccccaacagcagacagacagagcacgcacgtggtggagggccacctaaagattttgtattggcccccaaaactaacatgtaagggagcatgagctgatgctaggctgctcttaccatccttagatggcagctcagaaggttggtggcaccttatcacccctgctgggtgacaagaataaggctctgcccaggctgaaagttcctacccttttttttttttaatcttttatttttttgagacagagtctcactctgtcacccagactggagtgcagtggcgcgatctcggctcactgcaagctcagcctccccgattcacgccattctcctgcctcagcctcccgagtagctgggactacaggcgcctatcaccatgcctggctaattttttttgatttttagtaaagacagggtttcaccgtgttagccaggatggtctcgatcttctgacagatctgacctcgtgatccgcccatctccacctcccgcagtgctgggattacaggcatgagccaccgcgcccagctgccttttttttttggagtcttgctctgtcactgaggctggagtgcagtggcgcaatttcagctcactgcaacctctgcctcccaggttcaagccattctcctgccttgcctcagcctcccaagtaactgggattacaggtgcctgccaccacacctggctaatttttttttgtatttttagtagagatggggtttcactatgttggccaggctgatctcgaactcctgacctcgtgatccacccccttggcctcccaaagtgctgggattacaagcatgagccactgcgcccggcctagttctcttttcttaacagtggttgtaggacctatcaacagatgcagagaagggcgttataatcaatggtttaaagtcattttttcccttaagtccctggtccagagctatagtttctaaagcagagcttcttaaacttttaggaaatggatcttatggcccttcctgccataaaaacatatatacggccgggcgcggtggctcacacctgtaatcccagcactttgggaggccgaggcaggcggatcacaaggtcaggagattgagactatcctggctaacaccgtgaaaccctgtctctactaaaaataaaaaaattagccgggcgtggtggcaggcgcctgttgtcccagctacttgagaggctgaggcaggagaaatggcgtgaacctgggaagcggagcttgcagtgagccgagatcgtgccactgcactccagcctgggcgacagagcaagactccgtctcaaaaaaaaaaaaaaaaaaaaaagtttt

SEQ ID NO: 1741 - DNA, 646 bp, Homo sapiens
tgccaggctgtgtagtgtcagccccactagacattggtggctcatctggaggacggacagtaggtgagggagcagcagagcctttccattcccctttgccccagtggcctgatgtctcagcagatgccaacgaaggttgggtgccacgggaagtactagacaaaaactccaaactaggaagctgtgagttggtttcctcctccttcttggtactgtctgcctctgccagggcccgggcttgaagccgccgcttacacaccttgacgatgtcattcatgtgcaagtagctggcagctgccagcacatcctccacaggggtatcccctctcagggtcagctggccagcatacataaagtccagaagcagcccaaaggctggggctgtgacaatttcattgtgaatacacaccagatccctcttgtccaattcccgctccttgtagaaaagctggaagaatgggctgcaggaggccagcacagcccgatgggccaagaactgggtactacccaccatcacggtgcagtcacaaaggaaaccctgggaccgctgctcccggaggctctgcagcagctgctgactgtgttctgggaactccatagtaccccacgaaggaaagggggcccaaaaaaggtccccaccagtggc

SEQ ID NO: 1742 - DNA, 1284 bp, Homo sapiens
gttggcacatgcctgtaatcgcagctactcgggaggctgaggcaggagaattgcttgaacccgggaggcggaggttgtggtgagccgagatcgcgccactgcactccaacctggccaacaagagtgaatctccgtctcaaaaaaaaaagagagaaactttctttccctcacatgtcacaaggcatacagtgaattcctttaagttcacccaagatggggtagtttgcactgagtgaactgtgggaacattctgcaagggagcatgaatgtacacattttttctctttccccctctcagggttagatgctgctgccgctggaaaagaaaatcccctgggacccgagctggcaaagccagatggatgcgactgtggttgccatggcaaccccacctaaggagaatgtgaccctgctgagtctcttccactcatattcagaaccatattagaagtggtttcaagtgtctgcccacctgtgcgttaagggaaagagagagggcgctctcctctaaggtctgactgagcctgaagtcagcttagccagacctgggcagctggctgacctccttgcttaggtttactgttctggacagccatcagcaaccttggagacactagaagatgggagggagaccgggactgcccgggacctattagatgtagtgaacctgtatccaacctgtctggagctcatttgctcccaatctgagtggaggcaggaaccagggaaggcagtagtgagacctccatggccacagatgggagaaaggtggctcgctccacacacccaatgcctggcaagaactatgatggctttggtgtcagactttttttcttttttcctttttttgagacggagtaacaccctgttgcccaggctggagtgcagtggcgcaatcttggctcactacaacctccacctcccaggttcaaatgattctcctgcctcaacctcccaagtagctgggattacaggcacttgccactaccaccagctaatttttgtgtttttagtagagacagggttttcaccatgttggctaggctggtctccaactcctgaccttgtgatccacccgcctctgcctcccaaagtgctgggattacaggcatgagccactgtgcctggtcaaagtcagactgtttttattcatttatttttatttttatttattttttgaaactgagtctcgctctgtcgcccaggttggagtgcagtggcgtgatagctcactgcaacctctgccctcccagtttcaagtgattctcctgccttagcctctgg

SEQ ID NO: 1743 - DNA, 172 bp, Homo sapiens
tttaaagaatacaactatcagcttacaagaaaaacttttcctaagtccaaggacaggagaggcgcagtggctcacccctgcaattccagcaatttgggaggccaaggtgggtggatcacctgaggtcaggagttcgagaccagcctgactgacataatgaaaccccatcgct

SEQ ID NO: 1744 - DNA, 556 bp, Homo sapiens
actttacctgtcttctgagtacgaagcagctccaggaagctttggggtttttactgaggatgttcccacctgcaagacatgtgggaagaccttctcatgctcttacacactacggcgacatgccacggtgcacacacgtgagcgaccctatgagtgccgctactgcctgcggagctacacgcagtcaggagacctctaccgccacatccgcaaggctcacaatgaggacctggccaaacgcagcaaaccagatccagaagtgggaccccttctaggggtgcagcctctccctggctccccaacagcagacagacagagcagcagtggtggagggccacctaaagattttgtattggccccaaaaactaacatctaagggagcatgagctgatgctaggctgctcttaccatccttagatggcagctcagaaggttggtggcaccttatcacccctgctgggtgacaagaataaaggctctgcccaggctgaaagttcctacccttttttttttttaatcttttattttttggagacagagtctcactctgtcaccc

SEQ ID NO: 1745 - DNA, 379 bp, Homo sapiens
acttggccccacctcctccagtcctgctgcccctgggtcttcaaaagcctctggctgggagggctgtgccccatacactgctcctccagatgggaaagctctctcaggaccctgaggctgttcatctgacacatcagtctcttcatcagagatcacaatagcttcaactttcacctggaccagctcagcttcagctggggctggagcctgggatggaactggagctgagacaggggctggggctgacgttggggctgaggctgggggatagaagccttgcagtggtcctccaggatcctttggttccaccaccctcagactctcaggacccacatcaagagatggcagtggctccaatgaaactgctgagatgccagaa

SEQ ID NO: 1746 - DNA, 379 bp, Homo sapiens
ttctggcatctcagcagtttcattggagccactgccatctcttgatgtgggtcctgagagtctgagggtggtggaaccaaaggatcctggaggaccactgcaaggcttctatcccccagcctcagccccaacgtcagccccagcccctgtctcagctccagttccatcccaggctccagccccagctgaagctgagctggtccaggtgaaagttgaagctattgtgatctctgatgaagagactgatgtgtcagatgaacagcctcagggtcctgagagagctttcccatctggaggagcagtgtatggggcacagccctcccagccagaggcttttgaagacccaggggcagcaggactggaggaggtggggccaagt

SEQ ID NO: 1747 - DNA, 3563 bp, Homo sapiens
gtcagtttaggtttcagggcacagtttattaaaaaattttaagtaactgcaagtcccacccccgattccagtatctgtcccctccatatctcaacagaggggctgtctatcatatgtgggtgggatgggaaaggaagaggtatggtcctactatgcaagttactctccagccttcagcttgtgctgtcccaaacctgagtccctctgaccaaggtaagttgttcagagagcagtggtgccaccctgacagcactttaggacagtgccatctcctgagatcactagtcacattccagtcattgtgaccaatatattagttatcagtggtggtcaaaggtagaccagaggcacaggctgttgagggaagaccctctattaaagaaggttctaagaatgaaacatggaatgctcaacttgttaaagtgctcagctacaacattaaaaaagtgtcgggaaggtgtctattggtgagaaagcaaggtacaatctgaggggctcctggaaagatacaattttaaaagtacacaaaaggacttctgcttaaatcattccagcaatgagagaaaaaagcttagagcttagcctctgaattacttaagctgtaaatcaaatgtatctctaggtggagaccaactccttcaattcctcatggagacggaataaaacatttaccactgtcttttgctctaactcttctctcactaaataattgaaaatctggtttccttaatggacatcaccaccacaaaaatgtccaccatgggcaagtgatcaacttaagtatgaatggcctataaaccactttcctgcagggttggctagccaaaacctggagtgggacgagaaatttgagtttccacatctgccaggctgagaggcccatatctaagaacaagaggtccataatgtatctattctcttggcatgattacaagatccatgactggtgtgccatggcagtgagggaaaagtatccatcagcagcagtggttatcttgttctagaagctagtgtatagcctcagcagtcacttgtaagtccagtgggcagtggcccagccctggcccttgcataggtcccggtggcggagaaaacaggcatggactcggaaccgacggccacagtggggacaggcatgcagggctccagcatgggtcttcatgtgctctgtcagatggtgcttcagcttgaagcgcttgttgcagatgccacagccaaaaggccgaaggctgaaggtcagcatgatgtgccggtcacgctttggcttcactgcaaaccgcttcccacacaggcaaccaaagcgttttccatctgcagggggtgtcccccctagcttcacaggcccatgcacggcctggcctgctcccccaggtcctccaccccctgacaggatttcattcccatgaagatccactggtttccaggatggaccccctcccccagatgttggccctggccctgaaggcaacaagaaccctagctccccattcccttcagtgtcccctccagaaaacactttggtttcctcctttgctcctccaggctgagttccgcttcctgatatctcctccttaggctcgaagggttcctgcttaatgtagaagattttggggggcagtgcaggaggggcaggaagctcaagtggtgcactctcaccctctggaagctttcggggagtagcagtcatgggcagtgggtggggtccatgaggacggggaaaaacccctgatactctctggggctgaggagtctgagagagtgtggctgacccctggtcctcatcatcatcatcttcctcctcctcctcttcttcttccacctgaatttgcagcacttctcccagttcacttccctcccctcccacagggctctcagtggaagcagggctttcagtagaagcagaggactgtactggggtctggaaaggcgaagagcgaatgcaccagcctcctgtagaggatgtagtggaaagaagggcatggtaggagtttcctccacgggctgaaattccaccacctgaagtttctaattctctaagaatttctgagcactgatctactacctgccacatttgaaggccactggccacaaggagatgagcaggaagagcatccagtggcaggcggagacgccctgaataaatgagctggagcagcccctcgaaggcatcggcttcaatgacactcggtagagtgagacgaggcgcatcccccagaagcagcttgtcatggaagtaaggagaggcagcagctaacactgctttatgagccctaagttcccggccctgcaccaggagggacacatcacagaactttccctctagcctgtggcggttcagagattccagcagcgacgagctatgctgtgggaactcgatctggattgtccgtggggctgggttgcaggtcggggaggcgggtacaggcggcaaaggtgttggggtttccatggcctcctcgaaggtgacaagaattgggaagaggagaagggcttgggggtagactccacgcgggatgaaggctgcagaggaaaaagatggaggtcacagaagccctggataaagggagccacatcttctcaaacaaccccctccccacgagcaataactggaaacttttaagtcagtggcggtttctgcaaatcagtcccgcacaccaagaaagcaaaaacaaacaacaacaacaaccaccaccactaaacaccaacaggggttttaacttccagcccctgtggaagataagaaggaggtccttcagccaccagcctgccttcacctgcccagaacagctcctgccccgccgctccgttccgcctcacagtgcccacagaggtctgctcccgggaagccgcggtcacccggacaccgcgagtcccggcccgattgtccttcccgccgacacgcccccgccgttacacacgcggcgctgccctcgcagttacagtgccgctacagctccgtcccagaccggaagccgccgcctccccgccggacaccgtcgccaagtgcggcgggcggagctagagccgtagccaatcgaggaacggcagcctacaagcctcgtgttgattggctactgcagacgaggagggcggtgctagtaggagggcacaggcccagggtgtcctcgcaacgggcgtcccggggagctgctgaagtcctccccgctgcagaggaccgagaggcagggcccgggagagaacagcccggtcggagggggtgggccgtcagccgccccggaaagctgcgtttcccggtgattaagtgtagcacccgcccccggtaggtcctgagaggggcgagattagttgggtacttaccatgtgggcctggcacttgcccacatcactttgtgtcttcccaccggccctgcgagggtgggggttgccgtcctcagtttccaggcgggggaaacgggctggaagcgtcactcagctaatagtagtggacctgggactggaactcagatttgctaaggaaccaggcaggttctttcctgttttctgcacgggagcattttaaccagcaattaaagaaaccttatttctaggtaatttttaaaaga

SEQ ID NO: 1748 - DNA, 3560 bp, Homo sapiens
tcttttaaaaattacctagaaataaggtttctttaattgctggttaaaatgctcccgtgcagaaaacaggaaagaacctgcctggttccttagcaaatctgagttccagtcccaggtccactactattagctgagtgacgcttccagcccgtttcccccgcctggaaactgaggacggcaacccccaccctcgcagggccggtgggaagacacaaagtgatgtgggcaagtgccaggcccacatggtaagtacccaactaatctcgcccctctcaggacctaccgggggcgggtgctacacttaatcaccgggaaacgcagctttccggggcggctgacggcccaccccctccgaccgggctgttctctcccgggccctgcctctctgtcctctgcagcggggaggacttcagcagctccccgggacgcccgttgcgaggacaccctgggcctgtgccctcctactagcaccgccctcctcgtctgcagtagccaatcaacacgaggcttgtaggctgccgttcctcgattggctacggctctagctccgcccgccgcacttggcgacggtgtccggcggggaggcggcggcttccggtctgggacggagctgtagcggcactgtaactgcgagggcagcgccgcgtgtgtaacggcgggggcgtgtcggcgggaaggacaatcgggccgggactcgcggtgtccgggtgaccgcggcttcccgggagcagacctctgtgggcactgtgaggcggaacggagcggcggggcaggagctgttctgggcaggtgaaggcaggctggtggctgaaggacctccttcttatcttccacaggggctggaagttaaaacccctgttggtgtttagtggtggtggttgttgttgtttgtttttgctttcttggtgtgcgggactgatttgcagaaaccgccactgacttaaaagtttccagttattgctcgtggggagggggttgtttgagaagatgtggctccctttatccagggcttctgtgacctccatctttttcctctgcagccttcatcccgcgtggagtctacccccaagcccttctcctcttcccaattcttgtcaccttcgaggaggccatggaaaccccaacacctttgccgcctgtacccgcctccccgacctgcaacccagccccacggacaatccagatcgagttcccacagcatagctcgtcgctgctggaatctctgaaccgccacaggctagagggaaagttctgtgatgtgtccctcctggtgcagggccgggaacttagggctcataaagcagtgttagctgctgcctctccttacttccatgacaagctgcttctgggggatgcgcctcgtctcactctaccgagtgtcattgaagccgatgccttcgaggggctgctccagctcatttattcagggcgtctccgcctgccactggatgctcttcctgctcatctccttgtggccagtggccttcaaatgtggcaggtagtagatcagtgctcagaaattcttagagaattagaaacttcaggtggtggaatttcagcccgtggaggaaactcctaccatgcccttctttccactacatcctctacaggaggctggtgcattcgctcttcgcctttccagaccccagtacagtcctctgcttctactgaaagccctgcttccactgagagccctgtgggaggggagggaagtgaactgggagaagtgctgcaaattcaggtggaagaagaagaggaggaggaggaagatgatgatgatgaggaccaggggtcagccacactctctcagactcctcagccccagagagtatcaggggtttttccccgtcctcatggaccccacccactgcccatgactgctactccccgaaagcttccagagggtgagagtgcaccacttgagcttcctgcccctcctgcactgccccccaaaatcttctacattaagcaggaacccttcgagcctaaggaggagatatcaggaagcggaactcagcctggaggagcaaaggaggaaaccaaagtgttttctggaggggacactgaagggaatggggagctagggttcttgttgccttcagggccagggccaacatctgggggagggggtccatcctggaaaccagtggatcttcatgggaatgaaatcctgtcagggggtggaggacctgggggagcaggccaggccgtgcatgggcctgtgaagctaggggggacaccccctgcagatggaaaacgctttggttgcctgtgtgggaagcggtttgcagtgaagccaaagcgtgaccggcacatcatgctgaccttcagccttcggccttttggctgtggcatctgcaacaagcgcttcaagctgaagcaccatctgacagagcacatgaagacccatgctggagccctgcatgcctgtccccactgtggccgtcggttccgagtccatgcctgttttctccgccaccgggacctatgcaagggccagggctgggccactgcccactggacttacaagtgactgctgaggctatacactagcttctagaacaagataaccactgctgctgatggatacttttccctcactgccatggcacaccagtcatggatcttgtaatcatgccaagagaatagatacattatggacctcttgttcttagatatgggcctctcagcctggcagatgtggaaactcaaatttctcgtcccactccaggttttggctagccaaccctgcaggaaagtggtttataggccattcatacttaagttgatcacttgcccatggtggacatttttgtggtggtgatgtccattaaggaaaccagattttcaattatttagtgagagaagagttagagcaaaagacagtggtaaatgttttattccgtctccatgaggaattgaaggagttggtctccacctagagatacatttgatttacagcttaagtaattcagaggctaagctctaagcttttttctctcattgctggaatgatttaagcagaagtccttttgtgtacttttaaaattgtatctttccaggagcccctcagattgtaccttgctttctcaccaatagacaccttcccgacacttttttaatgttgtagctgagcactttaacaagttgagcattccatgtttcattcttagaaccttctttaatagagggtcttccctcaacagcctgtgcctctggtctacctttgaccaccactgataactaatatattggtcacaatgactggaatgtgactagtgatctcaggagatggcactgtcctaaagtgctgtcagggtggcaccactgctctctgaacaacttaccttggtcagagggactcaggtttgggacagcacaagctgaaggctggagagtaacttgcatagtaggaccatacctcttcctttcccatcccacccacatatgatagacagcccctctgttgagatatggaggggacagatactggaatcgggggtgggacttgcagttacttaaaattttttaataaactgtgccctgaaacctaaactgac

SEQ ID NO: 1749 - DNA, 115 bp, Homo sapiens
catgcctgtaatcccagcactttggaaggctgaggcaggcggatcatgaggtcaggagatccagaccatcctggctaacacggtgaaaccccgtctctactaaaaatacaaaaaa

SEQ ID NO: 1750 - DNA, 1092 bp, Homo sapiens
taaaagaacaatctccgtttattaaacatgtttttttctgtttcaccacacactccagaaaaaaaggaaatggggctgggagtggagaaaaggggacagtgaggggggatagataaggctgggagtggggtggggagggagaacgagaaaacaaaataaaacaggtaggaagagcaactccctacccttgaggtggtgggtggggagggaagcagaggggcggggggggagggggccaggaagctctgtacagaagggttgcccccagcccacacacacacaccccggatatgtacagtacaaaccccagataattacaacagccaaagaagagagaaggaaggttggggagggtccaggggtagggcctgaggtggggaaagggcacagggataaaatttcacatatttacaacttttatataagtataaatttggccccggctgggtgtatgtgtagggggatgggactgaaggggaactgtccatacaaaagaaagaggagtagagtctaggagagtctcaataccaaacgcaaaaggatgaagggggcaaggctgggtaggggacagcagtcagggaagagggggtgccaaggaggggcttctcccctcccatggcctacccaccccaaaccccatccatcctacctcccctatcccgccagaaaactatgtacagagaaacaccgaaaaatcgtggagctggcgggagggagggaggtggaaggagattgggagggggaggatgagagggaagcccagccctgtcctacctcccccaggggacagagtcatggaagggggccccccaacacccctcctccaacacaggtccccccaccctgggggagagagacatggcttttcctagagtaagttcccccctccccctgggagtagagaccaagaagagagaaggaaggggcagaggggactgtgtgtcagagtaggacagatcaactagcctgtcctcccaacatacacaccctcctaaaccctgacccctcaccctaacctcaattccaccccacccaacacactgggggaggggggggcataagccccctcaccccgctctgggaccagccgag

SEQ ID NO: 1751 - DNA, 1092 bp, Homo sapiens
ctcggctggtcccagagcggggtgagggggcttatgcccccccctcccccagtgtgttgggtggggtggaattgaggttagggtgaggggtcagggtttaggagggtgtgtatgttgggaggacaggctagttgatctgtcctactctgacacacagtcccctctgccccttccttctctcttcttggtctctactcccagggggaggggggaacttactctaggaaaagccatgtctctctcccccagggtggggggacctgtgttggaggaggggtgttggggggcccccttccatgactctgtcccctgggggaggtaggacagggctgggcttccctctcatcctccccctcccaatctccttccacctccctccctcccgccagctccacgatttttcggtgtttctctgtacatagttttctggcgggataggggaggtaggatggatggggtttggggtgggtaggccatgggaggggagaagcccctccttggcaccccctcttccctgactgctgtcccctacccagccttgcccccttcatccttttgcgtttggtattgagactctcctagactctactcctctttcttttgtatggacagttccccttcagtcccatccccctacacatacacccagccggggccaaatttatacttatataaaagttgtaaatatgtgaaattttatccctgtgccctttccccacctcaggccctacccctggaccctccccaaccttccttctctcttctttggctgttgtaattatctggggtttgtactgtacatatccggggtgtgtgtgtgtgggctgggggcaacccttctgtacagagcttcctggccccctccccccccgcccctctgcttccctccccacccaccacctcaagggtagggagttgctcttcctacctgttttattttgttttctcgttctccctccccaccccactcccagccttatctatcccccctcactgtccccttttctccactcccagccccatttcctttttttctggagtgtgtggtgaaacagaaaaaaacatgtttaataaacggagattgttctttta

SEQ ID NO: 1752 - DNA, 117 bp, Homo sapiens
tagtagagacggggtttcaccgtgttagccaggatggtctggatctcctgacctcatgatccgcctgcctcagccttccaaagtgctgggattacaggcatgagccactgcacctgg

SEQ ID NO: 1753 - DNA, 23041 bp, Homo sapiens
aagcttgatctaaagcttttcccaagttcctcacagtattagtttcctagggttgctgtacaaaataacagactgaatgatttaaccaagagaaatttattgcctcacagttctggagcctggaagtgcaatatcaaggtggagacagggttggtttcctctggaggccataatgaaagcatctgttccaggtctctgtccttggcttgtagatggccatcttctggtggatccacacagtcttctccatgtgtatccttccttcagtttcccttatagggacaccagtgatgtcagattagggatcgaacccaacaacctcatttgaagttactcacctgtttgaaaaccctatgtccaaatacagttatagtgtaaggaactaggacttagggcttacaaatatggagtggggcatcatccagaccataccatttaaattgcagggtttctctccaatgtgagttcacatacacacattaaggtttgtgggattcagaaaggtattcccagattctctacattcatacagtttctctccagtgagatttctgatgtgtttggtaaggcttgagaattcagcaaagtcatttccacattccctgatgcagggtcttctccactgtgaattcatatgtgttcattaagacctgagatacaaagttgcttccacatttttacattcatagggtttctccccagtgagttttcatgtcttcagagagaacagggacacctttaggttttcccacattccttatgctgacagtctctcatccgcatgccttctttcatgatttcgaaaggaactggaagaactgaaggctttcccgcactccttacattcatagggtttctctccagtgtgagttcgttcatgtaactgaaacgaattggagtaactgaaggatttcccacactgtttacatttgtagggtttttctccagtgtggatccgcatgtgaaggttaacacacgtgggaaacttaaaagctttgccacattccatacacgtgaatggttttttggcgctgtgggtccgcatgtgattattaagactggaggaatgcgtaaatgctttaccacattccaggcactcaaagggcttctctccagtgtgaattctcaaatgtccactaagatttgaagaaatagcaaaggctttcccacatttgacacattcaaaaggcttctctccagtgtgagttcttgtatgttcactaaggcgagaggatctggcaaaggcctttccacattccttacattcatagggcctctctccactgtgagttcgtgcatgcttagtaaggtctgagttctgagtgaaggctttcccacaatccttacatttatagggttttattccagtgtgaattcgaaagtgatcactgaggcatgaggaatttctaaaggattttccacatatcttacattcaaagggatcctttgcagtgtgagtttttaaatgttcagtaagttgagaagatctagtgaaggctatcccacattccttgcattcataaggcttctcacccacatggattttcatatgttgacttaagcaagaggaaacagtgaaggctctcccacaatccttacatttataaggtttctctccagtgtgagtttttctgtgctgagtaagttgacaagacctggtgaaggctttcccacactccttacactcatagggattgtctccagtgtgggttcccatgtgaatattaaggtatgcagaatatctaaatccttttccacattccttacatttgtagggtttttctgacctgtgagtttgtatacgcacagcaaggtctgtggagtgaataaagcctctcccacattccttccattcatggagactttctccattgtgagttcttaaatgtccctgaaggtgtgaatgattaatgaaggatttcccagagtcactgcaatcaaaagctttctctcctgtgcacgttctctggcaaacaacatctgggttcaggctgaaggcttttccacactgactaaatacagaacgttgctctccagtagaggttttcttgtgcagagtaaggaagtctactccatacagataacactcaaatgtgttctcactattttgagttctcacatgtgtcttaaggcatgagtgttcactggagacatctccacattgcttaacatcactgacctcccctccgttgtggcttcctatctgttgataaaggaatgaatgatgattaaaggacggttcagattgattaacagattccactcatctgaagagaggaacactgtgatgattattatcatgtttaccattttcattacacacatataagtaatgcccttttgatttctttccagcggaatgacaaaaaactcctgccaggctgtgccatctactctaatctcaaatgtctgtagagttttatgaaattgtcttaaaaactcactatctagttacaaatgtgtacttgaggggaactctaaaacacctaagtgttggctgggcgcagtggctcacgcctgtaatcccagtgctttgggaggccaacgtgggcagatcacctcaggtcaagagttcaagaccagtctggccaacatggtgaaaccctgtctctactaaaagtacaaaaactagccgggcatggtggcacgtgcctgtactcccagctactcagcagggtgaggcacaagaatcgcttgaacccaggaggtggaggttgcagtgagccaagatcatgccactgcattccagcctgggtgacagaccaagactctgtctaagaaaaaaacaacaataagtgtcaagctagatttcaagcatccccaggtcatcgtattctgagtctctctccagagtcattatcccttttgggaatgctacttatctcaaagagctctcattctgctaattttctttttcttttaatgtaattaaatttagtttttagcgccaagatcttgctacgttgaccaggctggtctagaactcctggcctcaagtgatcctcccacttcagcctcccaaagtgctgggattacaggtgtgagccaccattcccagctttattctgattttctataatggaatccccaatcatctctaaatgtgaaaactaagacgtatccttgttaatcttaccatttgaatcccactggaggttggctcccccaaaacatcctgctgaagggctaactctttggttttaagttgcactttccattctgaagctgaagagaaaaagaaatgtaagggtttggagacatacagggtagacagatggagctgaaaatgagagggatcatttgtacttgttttctttttttcttgagacggtgtctcactctgttgcccaggctggagtgcaatggcgtggtctcagctcactgcaacctctgcctctcaggttcaagtgattctcctgcctcagcctcctgagtagctgggactacaggcacatgccacaacgcccagctaatttttgtatttttagtagagacgagatttcaccatgttggccaagctagtctcaaactcctgacctcgtgatccacacgcctcagcccctcaaagtgctgggattacaggcattagccaccacacccggcccctgtatttgttttcaaattaaacacggtaacaaaaaacaaacacaaagacagatttgaagattgtatatcaaaaatttggcaataataaggatatagcgtcaaattttacatagtttactacaaactgattctatgaaaattataaactgatggtgaacacaaagaatattaccatggaaggaaagttgaggaatagaacaaaaagcacacatcaaaacaaggagcttgtttttgttttttgtttttttttttttttgagaaagactttcactcttgtcactcaggctggagtgcaatagaacaatctcggctcactgcaacttccgcctcccaagttcaagcgattctcctgcctcagcctcccgagtagctgggattacaggcacctaccaccaagcccagctaatttttgcatttttagtagagacagggtttcagcatgttggccatgctggtctcgaactcctgacatcaggtgatcctcccacctcggcctcccaaagttctgggattacagacgtgagccaccgtgccaggccttttttttttttttttttttttttttgagacagagtcttgctctctcaccccagctggagttcagcggcacgatcttggctcattgcaaccttcggcccctgggttcaagcgattctcctgcctcagcctccctagtagctgggactacaggagtgcgccaccacgcccagctaatagttgtatttttgtagcgatggggtttcaccatgttggccaggctggtctcaaactcatgacctcatgtgatctgcccgcctcagcctcccaaagtgctgagattataggcgtgagccaccacacctggcccaaaacaggaacttttaaagaagaaaccaacgggtcctatcacagaaaagaatgagtagacaaagcgtaaaagtatgagaagttgaagatttcttaacttctgagaaagaaatggcctacctgggcatggtggctcatgcctgtaatcccagcactttgggaggccaaggcaggtggatcacttgaagtcaggagtttgggaccagcgtggccaatgtggtgaaaccctctctccactaataatacaaaaaattaaccaggcgtggcacacacctgtagtcccggctactcgggaggacgagtactcaggagaattacctgaacccgggaggctgaagttgcagtaagccgagatcgcaccactgcactacagcctgggtgacagtgaaactgtgtctcagaaaaaaataaaaataaaaaaaataatggcctcaacactgtgagatgaagcacatcttaaaaagtttcctcattatggctaagcgtggtggctcacgcctgtaatcccagcactttgggaggccgaggtgggcagatcatgagatcaggagtttgagaccacactgaccaacacggtcaaaccccgcctctactaaaaatacaaaaattagccaggcatggtggcgtgagcctgtaatcccagctactcagggggctgaggcaggagatcagaaggctgaggcaggagaatcgcttgcacctgcgaggcggaggttgcagtgagctgagactgtgccacggcactccagcctgggtgacagagtgagactccatctcaaaaaaaaaaaaaagtttcctcattatacttataaacatactgaacttattgaccagggcggtcctttgtgaacactcaccttggaaatcacctctctgcactgtcctagactcttcttgttccagccaagagatcagactgggtttgaagagctgatatcctgtgcacaaagaaagatacattaccagaagaggctcatgcaagagatgataaatctttccacaactcaggagatatagttccaatggaagcagtgaaattattttaaaagggctaaaaatgcaaatatcgtctgtctgtgcccccaaaagattggtgatctctgatccctgaagcccaaatccaggctgatgtacacacttacaaagcactaagacttttatccaaataggaagttaagtgaaacaaagagatcttcattctcatgggaaacaactatacatctcattcttcaacattatagcacatcagattcatgagagcttgttaaaacacagatgacaggggccctgttgcagtttctcactgagtatgtcaaaggtggagactgagaacatacatctccaacagtgctggtgatgctcttcatctgacaccacattttgagaatcaccaagtagatgaaaccctattagggcagggactatgtctgttatttcccattgtgttcagagttgctatctctgatgtgcaatacagtaagtacataacataatctgttccatagtaggctacaagggatgaggccagtcttacctactgtggccaaattcttgtagttctccagcatcacatctctgtagaggtttctctgagttgggtccagtaaagtccattcttctggggtgaagtccacagccagatcatcaaaagtcactgaatcctaaaccatcacacacatgctggcttgagccacaaaacatgtctaccagtgttcactgcaaaatgcaatacctacagagtctgagggctcacattgcccaccccaggaggtcctctctatccacactcactcactgtcagtcccctccagtgacacggcttgaatggcacttcttacacatgattgtatgtaacacaaccagactgggaggtcatctgatttccctccactgcagcacactcttgagcagatgctagataaacactgatgaatggaaagattatctcaaaggatactttcatgtcccttaccatgtgtcagaacactcaacaaaataaaaactatgcagttgggaccatgagggaagactaattaatcaatattgaaatactgggatgacattcaaggcaaaccctcaccaatatgacaggctccactccttccgggaattcgactagggactcagtccttgaaggaggctttatttgctttaagaagctctgaagataattctgtgtagaaggaaatgtgtctacctggtgatgcaagtatgatattttggagaaggatatacttcctgcatacctgataacaatttgtcagacagtcagccaccaccctttctacttctgtcttttcttgaaggcagactgggtccctgtaaagacctcatggaaaagaaagaaggcatgagaacccagggctgacgataattcccacattcacgtaccccaaagtcattccatcctactgtgagattcctatatactcccgcacactcaagaaaacacacacatacacaccaccgctatcaattccagggcactactgcctcacgtaaaggcaaaaaaaaggatagtcagccatgctgcccactgggaaaagggtaacagtcttattttacagataaggaaaacttctcttccctggaaagacacagcacctcttcccaaagcacacacagcagggggctgatgaagtattctggctgggcgtgatggctcacacctgtaatcctagcactttgggaggtcgaggcaggcagatcacttgaggttaggagttcgagaccatcctggccaacatggtgaaactccatctctactaaaattacaaaaaattagccaggtgtggtggcacacgcctgtaatcccagctactcgggaggctgaggcaggaaaatcgcttgaacctggggggcagaggtggcaatgagctgagatcatgccactgcactccagcctgagcaacagagcaagactctgtctcaaaaaaaaaaaaaaaaaaaggaacaaagcattccctagcccacatcagcacctcagaaatgaagctgcagcgtgaatgatcaggcacaggccactggactccatactgtgtggggggggacacctaaagcagggtatctgaaaatgaacagaaacaggacttaccataggacaaatcagtggctgccatcccacagggctgatggctgaatgtgcttcaaagcacctttcctttactccaaggatcactccaggacagcttaggaatctacacggacagaggtaacctccattctctttatccagggttaacggtatcctgtttgtataaatcattaatcaacaagcattacttatcagtcatcagacatcattagcactctctctgcagagcatatagaggaaaagacactgaaaacggtgtacactacaaatagtaggaagaccaacttccactactgaggaacagtgtgtgtcagaagtcacactagcagctttatatactcgcttaattatcataaccaccctttacagtagataccaatgacccctatttgataaagaaaaaatcaggccgggggcggtggctcacgcctgtaatcccagcactttgggaaaccaaggcaggtgtgtcagttgaggtcaggagttcaagaccagcctgggcaatgtggtgaaaccccatctctactgaaaacacaaaaattagctgggcatggtagtgcatgcctataaatcccagctactgaggaggctgaggcaggagaatcgcttgaacctgagagacagaggttgcagtgagccgagatcacaccacggcactccagcctggcaacagagtgaaactctctctcaaaaggaaaaaaaaaaaaagaaaaagaaaaaaaagaaaacctacaatcagacaacacttggatttggtccagaatcatccagtttggaagttgtgaaccaggacttgaacacaggcaattttgtccctgacacccaatctgtggctgctcttactttcccacatgaccagcgttagtctaaacctgcacagtacaacaccatggtcactacccacatgtgttattgaacacccactccatataaaccgagtatgacccaacaacagaatgtattttaatttaataaaatttatacaattaaaataaaatttaataaaaattaatcacaatctttaataaatcaaacacagaacaacagtgcaaatgctgattgacagaatggaatctgaacgatgaaaatcactgaaaactgaacagttcattatccatgaaccagatacacccccacaaggacgctacagcctttattctatgaatgagaaggctgaaactctgaggtcacactgggttacagaaaccccatgtctagactcctggtgtagattgtacccactaccatgggtttcaaactggggatccttaggctgaagagggccacaaatgtgtttaatttggtgaaatctaaaccaattatgttattttaaacttgaaatgtaattaatgtacaattaaaagtacagatcttaggtattcagtggatgaattttgacaatcgcatacacttgcataatcaaaagcctaaacaagatataaaacatgttcgtctccccatgaaaaccttcttgccccttccagtctatcttttcactctcaactccagataagcaccctgtgatttccttcatttagcagacacaacactggacaggtaaattaggcagtgtgctcatctctcgcaaatgtacatcctatcttcatttttctctactatttaaataacatgagataaaaattctaaaatctcccactgcaactgtggacttgtctatttcttcttgtgtatctgtaatgtatactcctttatacatcttgtaacaacattactgggtagatagatacacacattgaactttcctatttttggagcaacaaaacctttctttttttttttcttttgagacggaggctcgctctgtcacccaggctggagtgcagtggcgcgatctcggctcactgcaagctccgcctccaggttcacgccattctcctgcctcagcctcccgagtagctgggactataggcacccgccaccacacccggctaatttttttgtatttttagtagacacggggtttcaccctgtcagccaggatggtctcgatctcctgactttgtgatctgcccgcctcggcctcccaaagtgctggattacaggcgtgagccactgcacctggccacaacaaaaccttttttttatcataaggaactctgcgagtctctaggaatgttcttggatgatgctgggtgacactgcaacttgcttttctttgtggagtctctgtatctcatgggcagccttaggtatctttgggtgccaatgttccccttgacctggcatggagcctaaaggcacccagtgatggctggacagacaactgagatccttctcaacactgttaaagtacacccagactacagccccatcacaattcataacacaatatgcatctgagttctgaggaaatgcattgaactactcaaagaatgcaagggtgacaggaatactgtctctttctatgcacttagccaccacccatggcctgtctgcataccaaagactggtttcccctggccacttaatgtggatatttagtgctctcagtcttgtatccttactggcaccccaacttcctctgctcatgagcacaatagccagggttgcctgcattccagagggctgcttcctgctttccccgagtccaatgactagctctagtacccgctaaaagtgcagagcagaagcactacagccccgctaaaggctgaccctgaagggggcagtactaaaggaaaatcttccgagtggcagaacttcaggcagtgtattggcctgcttctgggtctggagtaagagttgacaagatgcatgcatacacatacacagattcatcaaaagttgccgatggcttggctggatggtcaaaaatgtggaatgaaccagagtggtaacaaggaaacctaggaaaaggtatatggatggacgtctctgaaaggaaagattgtgtcccacgtgaatgcctgccgtgatccactagaaatagagcagacaaaatcacgtgctctaaagatacctgttactttacctagctgcacctcagtgcttgctcaatgggcccattaaaaaatgttcatgacagcagggataaaggctatgtgtgggctcagcaataaggacttccccttaccaagtctgacccagctaacattactgctgggcctaatctcctgaaagcagaaatcaacactgagcatccaatacagcaccattccttagaggagaccagccagccatgctgtaatgggccctcttctatcaggaaattgtcaaagactcatccccaccagaacagactcacgttccggtgtggatctgcctttcgactagttaggcttctgctggcaccaccacccacggaatcacaacatgctttatcagtagtcatggcctccacacaacagagtttctaaacaagcaaagcatttcactgcagaggaagtgcaacaatggaagcatgtccttgaaatcaactggttccatcacacaccccatcactcagaagcagtggatctacatgaaaagtggaatcgcatactgaaaactcagttatagggccaaatgggggacaacccttagaaaggaattctgactcacaggtcaaggtgtacgctttgagtcataaagccttccatggtactgtctccccagagtcagaatacatgggtccaagaattgatgagtaggccaggcgcggtggctcatgcctggaatcccagcactttgggaggccgaggcaggtggatcgtttcaggtcaggagttcgtgaccagcccggccaacatggtgaaaccccgtctctactaaaaacacgaaaaattagctgggcgtggtgacacatgcctgtaatcctagctacttggaaagctgaggcaggagaatggcttgaacccgggaggtggaggttgcagtgagccgagattgtgccactgcactccagcctgggcgacagagcaagactccatctcaaaacaaaacaaaaaaatagaattgatgggtgaaggtggaattaactccactgacagaagtttgcttttattcccagcaactcagagcactgctggtctggagatcttcttagaccctagaggaaaatgccccccccagggggcacagctatggttctaatgcattggaacaggagactgccacttggcccttttgggcttcatataccactaaaccaagaggcaaaaaaaaaaaaaaaaaaaaagaaaaaagttaatctactggctggagtggttaatcccaattatcaaagggaaactgtggcactactagacaattgaggcaaggaggatgaagtgatgaggtgtagaacctccgagtacttctatactccatagaaaaggttaatggaaaaccacaactgaacgaaagcaggacaacagaggattcggactctgggcgaacgaagatttgtattgctcctccctggtacaaaacccggagcagctgaggttcaagtggagggcagggaaaatatggaattagtcactgaagaagtaaaccatggacatcaactacaacctcaagagcagtgacagaaacaagaaatgtagttttgcatgttttctctctgcttgttatacgtatgtgtgtttatatccatgtgtttatttatttaaatgaaccatttacttctatctttttcccacttttattttatatacacattattagaggttacatttataattttgtctttaagaaacagaatagttagaatgggactaaatttgaggagtaattgacatggcgtgccatgggaatacaaaggactgtttgaactgcgcatctgctcctttgggggtgggtgaggacttcttccctcatatcttcttaggtaggaatatagacttgtttaattattccaaagaaattcctatgtgtgtaggagagtgcatatggatggtaaagaaccaaaagtgaaatatgccagttagctgtttatttatctcagctccaatacccccatcgtctttgtcttagttaaaacttcccctgcctgtgtagctgtttgttatacagcctgcttgttcctcacctcactggccccaaatccaacacatctcacagctgctgactacagtgaaacttagtggccaacaccagagtcatataaataagaactttcctttgcgcaaccaatccacaacccccaaaggaagtcctgagggataacgtccatgcaccttaataacgcaaggcccaacaggtcctctctcattcctatcccacaggttgaacacccggctgtctctggacttccatcagcccccgagagcagcctcccatcctggggatctgtgagtaggaggatgcttctgacatttcatgtgttttgttgtgctgcctcctctacatcttgcccgcccaacacactggaatgtaactctcctcccggtctgggtagggctagaatttgcagccactctccagagagagagagaccccctagaccaaaacagaggaaaatatattcagtgtggtgaacagggtgtgtggtcacaacctgagggacacaagaccaggccttcagattgctcttggcctgtttactacctggcccactcacatggctgatgccatatgggagggctccacagcctgctggggtacctctctgctgctgtgcattgctgcctgttgtctctgtgaagcactgccaatactcccatccctaaattgggtgggtcctccatagtccaagcgctccctaggactcaccaactgctagccttaagagggcaagaggggcacgacagtcactatccaagactgctgtcacttccccaaataggaactgctgggctggaggaagccaactgtattcccaaggcctcactctggcataacgggcttgctactgagaggcagaaggggtaaggcaggcgctgggccaatcaaagggttagcggagtgcaagaggaagaccggcattctgactgcccactgtatggataagcagtacagacgaggccaccagacttcccactctgacaacagtagcaaccccttcactggggagatgacggcacctcgctggcaaggttgctgttggggtctgctatccccaggacactgccttccattgcatctgttgctctacgcccccaccctgacgaggtcaactgggcaccctagagagaaaggcggctgcctacaaaggggtcagatgggaagcacaaatggaggccagaggacccggggccactcgggaccaccgggagcttgtcaggtaaacaaaggaaaaaatattttagccacctggagatacaagccattctgaagattttacttagaagaaaaaaatagagggaaagaaactgattgtcttgaggtctggagttcccagtcctctgttgcctagaagcactgggcgccttacccctccttcttttcctcttatcaaccagagacagaaattaagaacccttcaggcagttaaaagtctaagaccaaaaaaaaaggaaaaaaagcctcgagatttaggaggttacaagttcaagaaaaaaaaaaagaggaactttttgaactttaagtactaaacaaatgccaggtctaacaaacataatcccgctggccctagattacttaatgatttaaacacagaccatgagacatggggaaaaaaataaaaggtaactagactttaactaacatttggtaaaatgtaccaattaacaaaactgcataggcctactcaatctggggctcaaattacacttatacctggggatcccactaaattcaaacattgtgctccctaaaatcttaaaagggtaactaaatacaggagaaaaaaaataggtacgcctcgctttaactgtagccttgcttaaatctcccattgtcatagtacccatggccctaaaatattccatattaggtataaatatgctaacataataaataacaaattaaaattaaagtgagactttgacacttacaaattggcttgataaaatgggaccccatggataattagttgaaatatttcacatggcccaatgtaagttacaacagggcctcaaggatgaaaacttctataaaacctaattaatgaaggggtgattatccctactgcttctctatttgacagcccaattgtgcctgctcttgaatctgaaaaagaaaataaagggcacctcatgctggattactacagccttcatactgtggtcccatccatcaaggtgcccacacccaatattattaaaactcctgattttattcaataaacaaccaataactattgtgcttttaattataaatttgaccaacatgtttgtttgtttttttttctgagattgagtcttgctctgtcacccaggctagaatgcagtggcacaatctcggttcactgcaacctccgccacccagggttcaagggattctattgcctcagcctcccgagtagctgggattacaggtgtgcgtcaccatgcccagctaatatatatatatatattttaagtagagacagggtttcagcatgttagccaggctggtcttgaactcctgacctcaagtgatctgcccacctcggcctcccaaagtgctgggattacaggtgtgagccaccacacccggcctggacaacatgccctgttcagtgcctatttcaacagcctctcagctgcagcttgcctctccctccaatgggacacaacacaccttttccaggctacccaacagatctgtcatcacatacgatctttgcaaacgagatcttaacaacatccaccttctccaggaacacaggtatgcaccgcaccgataacagccttccccaaggaaactcttgacatgtcattaaggggaagtaattccagtatcttttagtaatttttgggttctggtggcaacatatgcctgatttacaaattataatttaaattaaaatcaacaagcactcctattaatgcctcgaagaaaaaaaaaagaaaacggggggaaaaatcaacttcctaaaaggactcccttcatgctagagactggcaactttttaaatgcctgctggagtctctagaccacttacgatggtcattagctgccccaggccgtctaggagagactgcccctcctgacttcctgttattcaccagtaaaacaagtgactggccatctactgggctctcctggaaacagaggatctcacagacctgagcctgtgatcctcctatgcagctgcccactgtgctctaggtcagggaaacaaccccccataagctctgcctggccactgaggcctccttaggccacgatgaagccaatctcaggcccttgggtctaatccacccgcagaaggcagtggcttcccctgttctcagtcccttgcctgatgccagcgtgctgaaggtggtcactcctccctcccacaggtcccctgactacctggaaagcccctgggattaactaagtgaacactaatgggagttcatagactgtgcaaaggccactgctgaccattataagtgatggggctcagtggaatgctgctgccttccatcccttagccaggatgtccctaataaaggacaggacccaagaaacaacgtgcctggccaaacttcaggcagctgtcttagcgctggatgcccaggtcaacaaaccgacccaccttcttcatggttacaataaactattgggtcattacctaaaaactgtcccttccagggtgggaaaaaaaaaaaaaaaaaccctgggaatctcttgtctgacagatacccaaaatataaagcaaaatcccatacctctccaaacactaaaggcacaatacgaggccttgccaggacactacttattcccttcagagttacagacattattagtaacctacatatatatttcacttcttttttgtcaatttaattttttttttaagaggcagggtctcgctatgttgcccaggctggtctcaaactcctgggctcaagcaatcctcccacttcggcctcccaaactcctgggattacaggggcgagccactgtgcccaacccatgtttcatttcttaaaatacataatgctagcgcctcgaaaaatatattcaatagaactttcatttccctaataggtctcagataactggtttcactgaaagacagaaaaatgtcctcaaataactacttttcaaattccagtccaaaaaacaaactcctgaaattctctatcatgctctagggcttaacttattttcaatcttgcccccatcccacaaacactgaaggccaaatcgagggtgcacagtcgcctgggacttactaacattagattgtcccagaggcccggcagctgctcatctgataggggacccacctgaacctaaacttccaccaaaagacagaaacaaaaacatgttgtcaggtacagctacatatcattctgttaacggttcgtcttactagatgctttgttggtttacaacctagagggccacatctacttcaatgggtatccactttataccccagtgacatcctagacgaccttgtcctagcccaaaatatcaccgctggaaacaacattgcctccagcaacacagccctgacccaagactctgatggtggagatgactccaccattacactaaaacctccacacagtgacatccgtggactgcctctcctaaaacacaaatggacacagaacatttttttctttctgaactgtctgcttagcccctgatcctggtagcgtacttgcattctgctcaaatgtgcacacccacatacccaagcctgaaggaaaatctggtaggagttactaaaattaatggagattactgttttccccaagaggcacctgcctcatgtcggtaaactccttaaccccagggaggggaccacctactccatgatgccttctaatgaagaaggaattcatgaattttacaagtacaatcaaagacgagcaaaaatttttactttttcctgcaaaagctaagtgtagcgtagcccctcctcctaccccacccccccacccagtagctaagagagaatactaactgcctgtttttccttctgtgctcagccagccttatctgtacttgctagtttcacactccttgaggctcagtgagttcctgcttcacctccctagcgcagctgcaaagttacaaggttaatacagaaacatggtttcccagggatgtggaacatgtagtatagataaatgtaaaagactgatcaactgccttcgttctcgcttctgtaagtacgcttcctgtatcagtagctcccggccagagtgctttaaaggtggctgctttctttgtccagggctcagactttcctggatgccagtcctcctgagccaggtgatcaccttttaaagacctttcctgaactcactctgttcagtctctcccatcgttgatcgtcccgcaacactactacccttctcactttctatcttgacctccagccttgcctatccaaccacaccactcttgccccttggttacacacaataccactaacctttacatatgctttactaaatcatcagctcataccctccaacataactgccctacatctatttttaggcctgacataagttatttggaacccagtcagaccccatcacctttggcttacttaaaactttcccctccctgtgtgctgtttgtgacatagcctacttgttcctcacctcactgaccccaaacccaacacaccccacagctgctgaccataatgaaacctactggccaacatcagtcatgtaaatcagttctccccactgctcaggtctacctaatccacaaccacgctgggaaagcctgagggataaggcccatggaccgtaacaaaggcacagtcccacaggtcctctctgtctcattccccacccactggttagcacccggctgtctcctgagttgctgtcaggacctcaagggcaaccctcttctcgcggatctgtaaggaataaaatgcttctgctacttgatgtgttttgttgtgttgccttttctgtacctaacccacccaacacaccagaacacctctcctcttggtcgggacagagctagaatttacagccactctccagagacagaagcctcaggacctaattagaggaacatactaaaaggggacatgggatggacactgcaaaagggagcgttgcctgctggatacaattgcgacacggtggtcagcagtgtgggtgtgagggcattggagggtgctctgtccacgccatatgcccataacacagtccttaggataccacaaaaccctggcccagtcaccaccaccctgtggccctcctaatatggacgccacatgctcaaaggactcccactagcagaggcaccctctgcacatgtgccgactggcttgatggcttgtgtccctcatgacacagacaatgcgcatgccaggatgcatgctgctgcatgacctgtaccccaaaggtttgttcccaaaggcctccgaacgtgaacactgaagtcccaggccttgcaaacaaagtggcatccaaatttcctgtgcatagctgcccatcaccatcagtgtgagtgtgccccagaggtgtgtttgtcacagcacttccagggcagacacgaaccagtccaagcctcatagctacagtggtgtcctgactccccctacaggctgatccacccattgcagctggcctttgccttgaaacactgcttcaatcttccctaaggactatgactaactcccgcctgagtaacccagcaaacttcaccatccagtgggctacagccacactgtggccaaatactgtaatatgaccccagagatccccacctgctggcattcatacccctggataacaccctcctgttgagcgcacgcacgacctttgaccagtttctaacagaagaataagcaaaaatgaagagaatgcagatgtaattgaggtctcaagtcagttgggttttgttttgttttgtttttagacagggtctcactctggttgcccaggatggagtgcagtagcgcaatctcagctcactgcagccttcacctccctggttcaagtgattctcctgcctcagtctctcaagtggctgggattacaggcacccaccaccatgcccggctaatttttgtattttttttaatagagtcagggtttcaccatgttggccaggctggccttcaactcctgacctgaagtgatccacccaccttggcctcccaaagtgttgggattacaggcgtgagccactgcacctggcttacttttatcttgatacacatagtgtatacattactgttgctgtagggcatgtatgtgtataaacctagtatgtactgccaacagtttttgaaattggtttgccaatacactctccaaaaagcagtatatgcacatcctcagcaactttatatcagaatccccatcaatgatttcactacatgcggctagttcactggaacccctaagtgccaaacagagaaaatgtatagaatttaagtcttcacttaaagtcatcagcaggttcttggaaactgagactttaagcgaaatgacatacaacaaagcgaattttttcacatgctaattaatataagcgagttaagctcctacagcatatttctggtcacaaaaacatcactaaacttctaaataaagaccccaaacacttctaatattaaatattgaaataaatgtgaaatatatatacatttaagaaagactaataaaaataggctatttatccaatttttgatgaattggtatgtgatggcagttaacagtggtgggttaaaacaaataaatgcttccaaagcaaaaactctaaggaccacctcctaccaccaagaagctcaaaaacaataacaaatggggccagcttgctaagtggtaccatttactgttgtacagttgtatcattatcaaatgttttaggaatttttattttacaatagtttgtattcattcattcattctccaatccacctattccagttccagaatgaaaatggccagagcccatcctaacagctcagggcacacacacacatagtgggacaatttagacacaccaattaagctaacatgtgcatctttggcatgtgggaagaaaccagagtacccagagaaaacccatgcagacatgggaagaacgtgcagaatctacagagtggccctactggaatttgattttttttccgtcatcgatgttataattaacagacattattctaagatctgttgtatttccaggccatgtggccccttcacagctttttggcagcccacattggcaggtgagttttctggtcatttacttacatggattgtatcaagccaaccccctaggtgtatgagtgtctataaggagtcacgcagagtgcttactctggacattccttcagggaaacgaaggactaatttaggtaggagaaggaacccaaaagtgaattgaaaaaaacaacgagagaagttttgtctgtttatgaatatacatatttcctaagactaataattaacatcagtgaattttcatggagagcttatttttcagtgatcaagcactgattctcattaatcccttgaattaatttcttattcatgtaattaaaacacattcatgcttctcctattttcccttgatttacatcatttgtcagatatcacttactttggccaggcacagtggcttatacctgtaatcccagcattttgggaggccgaggtgggtggatcacttgaggtcaggagtctgagaccagactggccaacatgctgaaaccatctctactaaaaaaaaaaaaaatacaaaaatacaaaaattagccaggcatggtggcgcacacttgtaatcccagctactagggtggctgaggcaggaggatggcttgaaaacccaagaggtggaggttacagtgtttcagtgagccgagatcctgccactgcactggagcctggcaacagcgaaactctgtctcccaaaagatatcacttactatttcctgtcatacatttaagattaaattatcccaccacattgtttccccaaccaaagaaagaatactgactctgtcaaacctgggagtaatctttgatgcactcctctctctcaccatagaagtggagtcagccaattcacagaatgctttgcccagctcttatttccttccccttcagtatggctaaatcataccatatttttggtctcagcttgcatatcactcttttcttagcattgcctattccaaagaaaaatagagaaaataattctgtcctctactttacttacagaccttcatcaatttgtaatacacttatttgcttggttacatgacagcctcctccactagtttacaacctccctaagaacagccctaggctgaatttttttactatgccttaattaaccattcagacactcatccatttacaggatacaccaataaatgaaggatacatttaaacacggcacagaatacaatcagaactaccaaaatgtataactttctgaaagaacgagtgactgcgcaaaaagacaatataacggataaacagtgtctgctagttttaaagagactaaaagacatgaaacttggatacgtaatagatcccaaaacaatcaaaaccatatattggaacaaagtggagaactgtacctttttacacagggtacatattaacaacattttaaattttctggggtaatagtattatggttttaaaaggacatgtctttatccacaggacacgtattaccaagcatttaaaccttaagtgtcacgcctgcaatgttcaacttacttcaaagcctccattccttcttcctaaaagcccgttttgaagctctgtggggaggtacaggcctaggaagttcagataaaaagaatagctgagtattcttgcttttcttcagtagaaagacttctggtctacaaacgtttatattcacatagagaaataaccacaccccagatacctaaaaaatagctttatgtttctacctgaatgtagagtgtcaaaagtaaatacaggatgcgcaaagagaaaaacaaattctcagataaaacaggaggaagaagcccccgaaaccaactttcaccccagtactcaccgcgacgagctggactcgccaggtacgggagattggggggatgaaggaccagtcaacctgattcgaacgacgaaaactcgttgtttctggaaaaaaaaaagtcacaaagaattgctttggaagagtttgaagcggcaatcaccgtgtttgcaaaaatcgtgaggaagcgcccttacgacagatcccgaaacggctcctggcccagggccgtcgcagtgacaactcgagtggctttttgaacctggcggcgccaggaggacccgcgcggccccggcggacgcgagcggagcaggcaaggtctctctaaggaggcccctcggcggcctggggcaaaccggtactttcgccaccccttccaccgctggctcccacccgtcatccgacctcgccaaagctgtattaagcccaaacgccaccaggaagaaaacgggtttggcggcgcggagaaagcgc

SEQ ID NO: 1754 - DNA, 23135 bp, Homo sapiens
gcgctttctccgcgccgccaaacccgttttcttcctggtggcgtttgggcttaatacagctttggcgaggtcggatgacgggtgggagccagcggtggaaggggtggcgaaagtaccggtttgccccaggccgccgaggggcctccttagagagaccttgcctgctccgctcgcgtccgccggggccgcgcgggtcctcctggcgccgccaggttcaaaaagccactcgagttgtcactgcgacggccctgggccaggagccgtttcgggatctgtcgtaagggcgcttcctcacgatttttgcaaacacggtgattgccgcttcaaactcttccaaagcaattctttgtgacttttttttttccagaaacaacgagttttcgtcgttcgaatcaggttgactggtccttcatccccccaatctcccgtacctggcgagtccagctcgtcgcggtgagtactggggtgaaagttggtttcgggggcttcttcctcctgttttatctgagaatttgtttttctctttgcgcatcctgtatttacttttgacactctacattcaggtagaaacataaagctattttttaggtatctggggtgtggttatttctctatgtgaatataaacgtttgtagaccagaagtctttctactgaagaaaagcaagaatactcagctattctttttatctgaacttcctaggcctgtacctccccacagagcttcaaaacgggcttttaggaagaaggaatggaggctttgaagtaagttgaacattgcaggcgtgacacttaaggtttaaatgcttggtaatacgtgtcctgtggataaagacatgtccttttaaaaccataatactattaccccagaaaatttaaaatgttgttaatatgtaccctgtgtaaaaaggtacagttctccactttgttccaatatatggttttgattgttttgggatctattacgtatccaagtttcatgtcttttagtctctttaaaactagcagacactgtttatccgttatattgtctttttgcgcagtcactcgttctttcagaaagttatacattttggtagttctgattgtattctgtgccgtgtttaaatgtatccttcatttattggtgtatcctgtaaatggatgagtgtctgaatggttaattaaggcatagtaaaaaaattcagcctagggctgttcttagggaggttgtaaactagtggaggaggctgtcatgtaaccaagcaaataagtgtattacaaattgatgaaggtctgtaagtaaagtagaggacagaattattttctctatttttctttggaataggcaatgctaagaaaagagtgatatgcaagctgagaccaaaaatatggtatgatttagccatactgaaggggaaggaaataagagctgggcaaagcattctgtgaattggctgactccacttctatggtgagagagaggagtgcatcaaagattactcccaggtttgacagagtcagtattctttctttggttggggaaacaatgtggtgggataatttaatcttaaatgtatgacaggaaatagtaagtgatatcttttgggagacagagtttcgctgttgccaggctccagtgcagtggcaggatctcggctcactgaaacactgtaacctccacctcttgggttttcaagccatcctcctgcctcagccaccctagtagctgggattacaagtgtgcgccaccatgcctggctaatttttgtatttttgtattttttttttttttagtagagatggtttcagcatgttggccagtctggtctcagactcctgacctcaagtgatccacccacctcggcctcccaaaatgctgggattacaggtataagccactgtgcctggccaaagtaagtgatatctgacaaatgatgtaaatcaagggaaaataggagaagcatgaatgtgttttaattacatgaataagaaattaattcaagggattaatgagaatcagtgcttgatcactgaaaaataagctctccatgaaaattcactgatgttaattattagtcttaggaaatatgtatattcataaacagacaaaacttctctcgttgtttttttcaattcacttttgggttccttctcctacctaaattagtccttcgtttccctgaaggaatgtccagagtaagcactctgcgtgactccttatagacactcatacacctagggggttggcttgatacaatccatgtaagtaaatgaccagaaaactcacctgccaatgtgggctgccaaaaagctgtgaaggggccacatggcctggaaatacaacagatcttagaataatgtctgttaattataacatcgatgacggaaaaaaaatcaaattccagtagggccactctgtagattctgcacgttcttcccatgtctgcatgggttttctctgggtactctggtttcttcccacatgccaaagatgcacatgttagcttaattggtgtgtctaaattgtcccactatgtgtgtgtgtgccctgagctgttaggatgggctctggccattttcattctggaactggaataggtggattggagaatgaatgaatgaatacaaactattgtaaaataaaaattcctaaaacatttgataatgatacaactgtacaacagtaaatggtaccacttagcaagctggccccatttgttattgtttttgagcttcttggtggtaggaggtggtccttagagtttttgctttggaagcatttatttgttttaacccaccactgttaactgccatcacataccaattcatcaaaaattggataaatagcctatttttattagtctttcttaaatgtatatatatttcacatttatttcaatatttaatattagaagtgtttggggtctttatttagaagtttagtgatgtttttgtgaccagaaatatgctgtaggagcttaactcgcttatattaattagcatgtgaaaaaattcgctttgttgtatgtcatttcgcttaaagtctcagtttccaagaacctgctgatgactttaagtgaagacttaaattctatacattttctctgtttggcacttaggggttccagtgaactagccgcatgtagtgaaatcattgatggggattctgatataaagttgctgaggatgtgcatatactgctttttggagagtgtattggcaaaccaatttcaaaaactgttggcagtacatactaggtttatacacatacatgccctacagcaacagtaatgtatacactatgtgtatcaagataaaagtaagccaggtgcagtggctcacgcctgtaatcccaacactttgggaggccaaggtgggtggatcacttcaggtcaggagttgaaggccagcctggccaacatggtgaaaccctgactctattaaaaaaaatacaaaaattagccgggcatggtggtgggtgcctgtaatcccagccacttgagagactgaggcaggagaatcacttgaaccagggaggtgaaggctgcagtgagctgagattgcgctactgcactccatcctgggcaaccagagtgagaccctgtctaaaaacaaaacaaaacaaaacccaactgacttgagacctcaattacatctgcattctcttcatttttgcttattcttctgttagaaactggtcaaaggtcgtgcgtgcgctcaacaggagggtgttatccaggggtatgaatgccagcaggtggggatctctggggtcatattacagtatttggccacagtgtggctgtagcccactggatggtgaagtttgctgggttactcaggcgggagttagtcatagtccttagggaagattgaagcagtgtttcaaggcaaaggccagctgcaatgggtggatcagcctgtagggggagtcaggacaccactgtagctatgaggcttggactggttcgtgtctgccctggaagtgctgtgacaaacacacctctggggcacactcacactgatggtgatgggcagctatgcacaggaaatttggatgccactttgtttgcaaggcctgggacttcagtgttcacgttcggaggcctttgggaacaaacctttggggtacaggtcatgcagcagcatgcatcctggcatgcgcattgtctgtgtcatgagggacacaagccatcaagccagtcggcacatgtgcagagggtgcctctgctagtgggagtcctttgagcatgtggcgtccatattaggagggccacagggtggtggtgactgggccagggttttgtggtatcctaaggactgtgttatgggcatatggcgtggacagagcaccctccaatgccctcacacccacactgctgaccaccgtgtcgcaattgtatccagcaggcaacgctcccttttgcagtgtccatcccatgtccccttttagtatgttcctctaattaggtcctgaggcttctgtctctggagagtggctgtaaattctagctctgtcccgaccaagaggagaggtgttctggtgtgttgggtgggttaggtacagaaaaggcaacacaacaaaacacatcaagtagcagaagcattttattccttacagatccgcgagaagagggttgcccttgaggtcctgacagcaactcaggagacagccgggtgctaaccagtgggtggggaatgagacagagaggacctgtgggactgtgcctttgttacggtccatgggccttatccctcaggctttcccagcgtggttgtggattaggtagacctgagcagtggggagaactgatttacatgactgatgttggccagtaggtttcattatggtcagcagctgtggggtgtgttgggtttggggtcagtgaggtgaggaacaagtaggctatgtcacaaacagcacacagggaggggaaagttttaagtaagccaaaggtgatggggtctgactgggttccaaataacttatgtcaggcctaaaaatagatgtagggcagttatgttggagggtatgagctgatgatttagtaaagcatatgtaaaggttagtggtattgtgtgtaaccaaggggcaagagtggtgtggttggataggcaaggctggaggtcaagatagaaagtgagaagggtagtagtgttgcgggacgatcaacgatgggagagactgaacagagtgagttcaggaaaggtctttaaaaggtgatcacctggctcaggaggactggcatccaggaaagtctgagccctggacaaagaaagcagccacctttaaagcactctggccgggagctactgatacaggaagcgtacttacagaagcgagaacgaaggcagttgatcagtcttttacatttatctatactacatgttccacatccctgggaaaccatgtttctgtattaaccttgtaactttgcagctgcgctagggaggtgaagcaggaactcactgagcctcaaggagtgtgaaactagcaagtacagataaggctggctgagcacagaaggaaaaacaggcagttagtattctctcttaggctactgggtgggggggtggggtaggaggaggggctacgctacacttagcttttgcaggaaaaagtaaaaatttttgctcgtctttgattgtacttgtaaaattcatgaattccttcttcattagaaggcatcatggagtaggtggtcccctccctggggttaaggagtttaccgacatgaggcaggtgcctcttggggaaaacagtaatctccattaattttagtaactcctaccagattttccttcaggcttgggtatgtgggtgtgcacatttgagcagaatgcaagtacgctaccaggatcaggggctaagcagacagttcagaaagaaaaaaatgttctgtgtccatttgtgttttaggagaggcagtccacggatgtcactgtgtggaggttttagtgtaatggtggagtcatctccaccatcagagtcttgggtcagggctgtgttgctggaggcaatgttgtttccagcggtgatattttgggctaggacaaggtcgtctaggatgtcactggggtataaagtggatacccattgaagtagatgtggccctctaggttgtaaaccaacaaagcatctagtaagacgaaccgttaacagaatgatatgtagctgtacctgacaacatgtttttgtttctgtcttttggtggaagtttaggttcaggtgggtcccctatcagatgagcagctgccgggcctctgggacaatctaatgttagtaagtcccaggcgactgtgcaccctcgatttggccttcagtgtttgtgggatgggggcaagattgaaaataagttaagccctagagcatgatagagaatttcaggagtttgttttttggactggaatttgaaaagtagttatttgaggacatttttctgtctttcagtgaaaccagttatctgagacctattagggaaatgaaagttctattgaatatatttttcgaggcgctagcattatgtattttaagaaatgaaacatgggttgggcacagtggctcgcccctgtaatcccaggagtttgggaggccgaagtgggaggattgcttgagcccaggagtttgagaccagcctgggcaacatagcgagaccctgcctcttaaaaaaaaaattaaattgacaaaaaagaagtgaaatatatatgtaggttactaataatgtctgtaactctgaagggaataagtagtgtcctggcaaggcctcgtattgtgcctttagtgtttggagaggtatgggattttgctttatattttgggtatctgtcagacaagagattcccagggtttttttttttttttttcccaccctggaagggacagtttttaggtaatgacccaatagtttattgtaaccatgaagaaggtgggtcggtttgttgacctgggcatccagcgctaagacagctgcctgaagtttggccaggcacgttgtttcttgggtcctgtcctttattagggacatcctggctaagggatggaaggcagcagcattccactgagccccatcacttataatggtcagcagtggcctttgcacagtctatgaactcccattagtgttcacttagttaatcccaggggctttccaggtagtcaggggacctgtgggagggaggagtgaccaccttcagcacgctggcatcaggcaagggactgagaacaggggaagccactgccttctgcgggtggattagacccaagggcctgagattggcttcatcgtggcctaaggaggcctcagtggccaggcagagcttatggggggttgtttccctgacctagagcacagtgggcagctgcataggaggatcacaggctcaggtctgtgagatcctctgtttccaggagagcccagtagatggccagtcacttgttttactggtgaataacaggaagtcaggaggggcagtctctcctagacggcctggggcagctaatgaccatcgtaagtggtctagagactccagcaggcatttaaaaagttgccagtctctagcatgaagggagtccttttaggaagttgatttttccccccgttttcttttttttttcttcgaggcattaataggagtgcttgttgattttaatttaaattataatttgtaaatcaggcatatgttgccaccagaacccaaaaattactaaaagatactggaattacttccccttaatgacatgtcaagagtttccttggggaaggctgttatcggtgcggtgcatacctgtgttcctggagaaggtggatgttgttaagatctcgtttgcaaagatcgtatgtgatgacagatctgttgggtagcctggaaaaggtgtgttgtgtcccattggagggagaggcaagctgcagctgagaggctgttgaaataggcactgaacagggcatgttgtccaggccgggtgtggtggctcacacctgtaatcccagcactttgggaggccgaggtgggcagatcacttgaggtcaggagttcaagaccagcctggctaacatgctgaaaccctgtctctacttaaaatatatatatatatattagctgggcatggtgacgcacacctgtaatcccagctactcgggaggctgaggcaatagaatcccttgaaccctgggtggcggaggttgcagtgaaccgagattgtgccactgcattctagcctgggtgacagagcaagactcaatctcagaaaaaaaaacaaacaaacatgttggtcaaatttataattaaaagcacaatagttattggttgtttattgaataaaatcaggagttttaataatattgggtgtgggcaccttgatggatgggaccacagtatgaaggctgtagtaatccagcatgaggtgccctttattttctttttcagattcaagagcaggcacaattgggctgtcaaatagagaagcagtagggataatcaccccttcattaattaggttttatagaagttttcatccttgaggccctgttgtaacttacattgggccatgtgaaatatttcaactaattatccatggggtcccattttatcaagccaatttgtaagtgtcaaagtctcactttaattttaatttgttatttattatgttagcatatttatacctaatatggaatattttagggccatgggtactatgacaatgggagatttaagcaaggctacagttaaagcgaggcgtacctattttttttctcctgtatttagttacccttttaagattttagggagcacaatgtttgaatttagtgggatccccaggtataagtgtaatttgagccccagattgagtaggcctatgcagttttgttaattggtacattttaccaaatgttagttaaagtctagttaccttttatttttttccccatgtctcatggtctgtgtttaaatcattaagtaatctagggccagcgggattatgtttgttagacctggcatttgtttagtacttaaagttcaaaaagttcctctttttttttttcttgaacttgtaacctcctaaatctcgaggctttttttcctttttttttggtcttagacttttaactgcctgaagggttcttaatttctgtctctggttgataagaggaaaagaaggaggggtaaggcgcccagtgcttctaggcaacagaggactgggaactccagacctcaagacaatcagtttctttccctctatttttttcttctaagtaaaatcttcagaatggcttgtatctccaggtggctaaaatattttttcctttgtttacctgacaagctcccggtggtcccgagtggccccgggtcctctggcctccatttgtgcttcccatctgacccctttgtaggcagccgcctttctctctagggtgcccagttgacctcgtcagggtgggggcgtagagcaacagatgcaatggaaggcagtgtcctggggatagcagaccccaacagcaaccttgccagcgaggtgccgtcatctccccagtgaaggggttgctactgttgtcagagtgggaagtctggtggcctcgtctgtactgcttatccatacagtgggcagtcagaatgccggtcttcctcttgcactccgctaaccctttgattggcccagcgcctgccttaccccttctgcctctcagtagcaagcccgttatgccagagtgaggccttgggaatacagttggcttcctccagcccagcagttcctatttggggaagtgacagcagtcttggatagtgactgtcgtgcccctcttgccctcttaaggctagcagttggtgagtcctagggagcgcttggactatggaggacccacccaatttagggatgggagtattggcagtgcttcacagagacaacaggcagcaatgcacagcagcagagaggtaccccagcaggctgtggagccctcccatatggcatcagccatgtgagtgggccaggtagtaaacaggccaagagcaatctgaaggcctggtcttgtgtccctcaggttgtgaccacacaccctgttcaccacactgaatatattttcctctgttttggtctagggggtctctctctctctggagagtggctgcaaattctagccctacccagaccgggaggagagttacattccagtgtgttgggcgggcaagatgtagaggaggcagcacaacaaaacacatgaaatgtcagaagcatcctcctactcacagatccccaggatgggaggctgctctcgggggctgatggaagtccagagacagccgggtgttcaacctgtgggataggaatgagagaggacctgttgggccttgcgttattaaggtgcatggacgttatccctcaggacttcctttgggggttgtggattggttgcgcaaaggaaagttcttatttatatgactctggtgttggccactaagtttcactgtagtcagcagctgtgagatgtgttggatttggggccagtgaggtgaggaacaagcaggctgtataacaaacagctacacaggcaggggaagttttaactaagacaaagacgatgggggtattggagctgagataaataaacagctaactggcatatttcacttttggttctttaccatccatatgcactctcctacacacataggaatttctttggaataattaaacaagtctatattcctacctaagaagatatgagggaagaagtcctcacccacccccaaaggagcagatgcgcagttcaaacagtcctttgtattcccatggcacgccatgtcaattactcctcaaatttagtcccattctaactattctgtttcttaaagacaaaattataaatgtaacctctaataatgtgtatataaaataaaagtgggaaaaagatagaagtaaatggttcatttaaataaataaacacatggatataaacacacatacgtataacaagcagagagaaaacatgcaaaactacatttcttgtttctgtcactgctcttgaggttgtagttgatgtccatggtttacttcttcagtgactaattccatattttccctgccctccacttgaacctcagctgctccgggttttgtaccagggaggagcaatacaaatcttcgttcgcccagagtccgaatcctctgttgtcctgctttcgttcagttgtggttttccattaaccttttctatggagtatagaagtactcggaggttctacacctcatcacttcatcctccttgcctcaattgtctagtagtgccacagtttccctttgataattgggattaaccactccagccagtagattaacttttttctttttttttttttttttttttgcctcttggtttagtggtatatgaagcccaaaagggccaagtggcagtctcctgttccaatgcattagaaccatagctgtgccccctggggggggcattttcctctagggtctaagaagatctccagaccagcagtgctctgagttgctgggaataaaagcaaacttctgtcagtggagttaattccaccttcacccatcaattctatttttttgttttgttttgagatggagtcttgctctgtcgcccaggctggagtgcagtggcacaatctcggctcactgcaacctccacctcccgggttcaagccattctcctgcctcagctttccaagtagctaggattacaggcatgtgtcaccacgcccagctaatttttcgtgtttttagtagagacggggtttcaccatgttggccgggctggtcacgaactcctgacctgaaacgatccacctgcctcggcctcccaaagtgctgggattccaggcatgagccaccgcgcctggcctactcatcaattcttggacccatgtattctgactctggggagacagtaccatggaaggctttatgactcaaagcgtacaccttgacctgtgagtcagaattcctttctaagggttgtcccccatttggccctataactgagttttcagtatgcgattccacttttcatgtagatccactgcttctgagtgatggggtgtgtgatggaaccagttgatttcaaggacatgcttccattgttgcacttcctctgcagtgaaatgctttgcttgtttagaaactctgttgtgtggaggccatgactactgataaagcatgttgtgattccgtgggtggtggtgccagcagaagcctaactagtcgaaaggcagatccacaccggaacgtgagtctgttctggtggggatgagtctttgacaatttcctgatagaagagggcccattacagcatggctggctggtctcctctaaggaatggtgctgtattggatgctcagtgttgatttctgctttcaggagattaggcccagcagtaatgttagctgggtcagacttggtaaggggaagtccttattgctgagcccacacatagcctttatccctgctgtcatgaacattttttaatgggcccattgagcaagcactgaggtgcagctaggtaaagtaacaggtatctttagagcacgtgattttgtctgctctatttctagtggatcacggcaggcattcacgtgggacacaatctttcctttcagagacgtccatccatataccttttcctaggtttccttgttaccactctggttcattccacatttttgaccatccagccaagccatcggcaacttttgatgaatctgtgtatgtgtatgcatgcatcttgtcaactcttactccagacccagaagcaggccaatacactgcctgaagttctgccactcggaagattttcctttagtactgcccccttcagggtcagcctttagcggggctgtagtgcttctgctctgcacttttagcgggtactagagctagtcattggactcggggaaagcaggaagcagccctctggaatgcaggcaaccctggctattgtgctcatgagcagaggaagttggggtgccagtaaggatacaagactgagagcactaaatatccacattaagtggccaggggaaaccagtctttggtatgcagacaggccatgggtggtggctaagtgcatagaaagagacagtattcctgtcacccttgcattctttgagtagttcaatgcatttcctcagaactcagatgcatattgtgttatgaattgtgatggggctgtagtctgggtgtactttaacagtgttgagaaggatctcagttgtctgtccagccatcactgggtgcctttaggctccatgccaggtcaaggggaacattggcacccaaagatacctaaggctgcccatgagatacagagactccacaaagaaaagcaagttgcagtgtcacccagcatcatccaagaacattcctagagactcgcagagttccttatgataaaaaaaaggttttgttgtggccaggtgcagtggctcacgcctgtaatccagcactttgggaggccgaggcgggcagatcacaaagtcaggagatcgagaccatcctggctgacagggtgaaaccccgtgtctactaaaaatacaaaaaaattagccgggtgtggtggcgggtgcctatagtcccagctactcgggaggctgaggcaggagaatggcgtgaacctggaggcggagcttgcagtgagccgagatcgcgccactgcactccagcctgggtgacagagcgagcctccgtctcaaaagaaaaaaaaaaagaaaggttttgttgctccaaaaataggaaagttcaatgtgtgtatctatctacccagtaatgttgttacaagatgtataaaggagtatacattacagatacacaagaagaaatagacaagtccacagttgcagtgggagattttagaatttttatctcatgttatttaaatagtagagaaaaatgaagataggatgtacatttgcgagagatgagcacactgcctaatttacctgtccagtgttgtgtctgctaaatgaaggaaatcacagggtgcttatctggagttgagagtgaaaagatagactggaaggggcaagaaggttttcatggggagacgaacatgttttatatcttgtttaggcttttgattatgcaagtgtatgcgattgtcaaaattcatccactgaatacctaagatctgtacttttaattgtacattaattacatttcaagtttaaaataacataattggtttagatttcaccaaattaaacacatttgtggccctcttcagcctaaggatccccagtttgaaacccatggtagtgggtacaatctacaccaggagtctagacatggggtttctgtaacccagtgtgacctcagagtttcagccttctcattcatagaataaaggctgtagcgtccttgtgggggtgtatctggttcatggataatgaactgttcagttttcagtgattttcatcgttcagattccattctgtcaatcagcatttgcactgttgttctgtgtttgatttattaaagattgtgattaatttttattaaattttattttaattgtataaattttattaaattaaaatacattctgttgttgggtcatactcggtttatatggagtgggtgttcaataacacatgtgggtagtgaccatggtgttgtactgtgcaggtttagactaacgctggtcatgtgggaaagtaagagcagccacagattgggtgtcagggacaaaattgcctgtgttcaagtcctggttcacaacttccaaactggatgattctggaccaaatccaagtgttgtctgattgtaggttttcttttttttctttttctttttttttttttccttttgagagagagtttcactctgttgccaggctggagtgccgtggtgtgatctcggctcactgcaacctctgtctctcaggttcaagcgattctcctgcctcagcctcctcagtagctgggatttataggcatgcactaccatgcccagctaatttttgtgttttcagtagagatggggtttcaccacattgcccaggctggtcttgaactcctgacctcaactgacacacctgccttggtttcccaaagtgctgggattacaggcgtgagccaccgcccccggcctgattttttctttatcaaataggggtcattggtatctactgtaaagggtggttatgataattaagcgagtatataaagctgctagtgtgacttctgacacacactgttcctcagtagtggaagttggtcttcctactatttgtagtgtacaccgttttcagtgtcttttcctctatatgctctgcagagagagtgctaatgatgtctgatgactgataagtaatgcttgttgattaatgatttatacaaacaggataccgttaaccctggataaagagaatggaggttacctctgtccgtgtagattcctaagctgtcctggagtgatccttggagtaaaggaaaggtgctttgaagcacattcagccatcagccctgtgggatggcagccactgatttgtcctatggtaagtcctgtttctgttcattttcagataccctgctttaggtgtccccccccacacagtatggagtccagtggcctgtgcctgatcattcacgctgcagcttcatttctgaggtgctgatgtgggctagggaatgctttgttcctttttttttttttttttttgagacagagtcttgctctgttgctcaggctggagtgcagtggcatgatctcagctcattgccacctctgccccccaggttcaagcgattttcctgcctcagcctcccgagtagctgggattacaggcgtgtgccaccacacctggctaattttttgtaattttagtagagatggagtttcaccatgttggccaggatggtctcgaactcctaacctcaagtgatctgcctgcctcgacctcccaaagtgctaggattacaggtgtgagccatcacgcccagccagaatacttcatcagccccctgctgtgtgtgctttgggaagaggtgctgtgtctttccagggaagagaagttttccttatctgtaaaataagactgttacccttttcccagtgggcagcatggctgactatccttttttttgcctttacgtgaggcagtagtgccctggaattgatagcggtggtgtgtatgtgtgtgttttcttgagtgtgcgggagtatataggaatctcacagtaggatggaatgactttggggtacgtgaatgtgggaattatcgtcagccctgggttctcatgccttctttcttttccatgaggtctttacagggacccagtctgccttcaagaaaagacagaagtagaaagggtggtggctgactgtctgacaaattgttatcaggtatgcaggaagtatatccttctccaaaatatcatacttgcatcaccaggtagacacatttccttctacacagaattatcttcagagcttcttaaagcaaataaagcctccttcaaggactgagtccctagtcgaattcccggaaggagtggagcctgtcatattggtgagggtttgccttgaatgtcatcccagtatttcaatattgattaattagtcttccctcatggtcccaactgcatagtttttattttgttgagtgttctgacacatggtaagggacatgaaagtatcctttgagataatctttccattcatcagtgtttatctagcatctgctcaagagtgtgctgcagtggagggaaatcagatgacctcccagtctggttgtgttacatacaatcatgtgtaagaagtgccattcaagccgtgtcactggaggggactgacagtgagtgagtgtggatagagaggacctcctggggtgggcaatgtgagccctcagactctgtaggtattgcattttgcagtgaacactggtagacatgttttgtggctcaagccagcatgtgtgtgatggtttaggattcagtgacttttgatgatctggctgtggacttcaccccagaagaatggactttactggacccaactcagagaaacctctacagagatgtgatgctggagaactacaagaatttggccacagtaggtaagactggcctcatcccttgtagcctactatggaacagattatgttatgtacttactgtattgcacatcagagatagcaactctgaacacaatgggaaataacagacatagtccctgccctaatagggtttcatctacttggtgattctcaaaatgtggtgtcagatgaagagcatcaccagcactgttggagatgtatgttctcagtctccacctttgacatactcagtgagaaactgcaacagggcccctgtcatctgtgttttaacaagctctcatgaatctgatgtgctataatgttgaagaatgagatgtatagttgtttcccatgagaatgaagatctctttgtttcacttaacttcctatttggataaaagtcttagtgctttgtaagtgtgtacatcagcctggatttgggcttcagggatcagagatcaccaatcttttgggggcacagacagacgatatttgcatttttagcccttttaaaataatttcactgcttccattggaactatatctcctgagttgtggaaagatttatcatctcttgcatgagcctcttctggtaatgtatctttctttgtgcacaggatatcagctcttcaaacccagtctgatctcttggctggaacaagaagagtctaggacagtgcagagaggtgatttccaaggtgagtgttcacaaaggaccgccctggtcaataagttcagtatgtttataagtataatgaggaaacttttttttttttttgagatggagtctcactctgtcacccaggctggagtgccgtggcacagtctcagctcactgcaacctccgcctcgcaggtgcaagcgattctcctgcctcagccttctgatctcctgcctcagccccctgagtagctgggattacaggctcacgccaccatgcctggctaatttttgtatttttagtagaggcggggtttgaccgtgttggtcagtgtggtctcaaactcctgatctcatgatctgcccacctcggcctcccaaagtgctgggattacaggcgtgagccaccacgcttagccataatgaggaaactttttaagatgtgcttcatctcacagtgttgaggccattattttttttatttttatttttttctgagacacagtttcactgtcacccaggctgtagtgcagtggtgcgatctcggcttactgcaacttcagcctcccgggttcaggtaattctcctgagtactcgtcctcccgagtagccgggactacaggtgtgtgccacgcctggttaattttttgtattattagtggagagagggtttcaccacattggccacgctggtcccaaactcctgacttcaagtgatccacctgccttggcctcccaaagtgctgggattacaggcatgagccaccatgcccaggtaggccatttctttctcagaagttaagaaatcttcaacttctcatacttttacgctttgtctactcattcttttctgtgataggacccgttggtttcttctttaaaagttcctgttttgggccaggtgtggtggctcacgcctataatctcagcactttgggaggctgaggcgggcagatcacatgaggtcatgagtttgagaccagcctggccaacatggtgaaaccccatcgctacaaaaatacaactattagctgggcgtggtggcgcactcctgtagtcccagctactagggaggctgaggcaggagaatcgcttgaacccaggggccgaaggttgcaatgagccaagatcgtgccgctgaactccagctggggtgagagagcaagactctgtctcaaaaaaaaaaaaaaaaaaaaaaaaaaggcctggcacggtggctcacgtctgtaatcccagaactttgggaggccgaggtgggaggatcacctgatgtcaggagttcgagaccagcatggccaacatgctgaaaccctgtctctactaaaaatgcaaaaattagctgggcttggtggtaggtgcctgtaatcccagctactcgggaggctgaggcaggagaatcgcttgaacttgggaggcggaagttgcagtgagccgagattgttctattgcactccagcctgagtgacaagagtgaaagtctttctcaaaaaaaaaaaaaaacaaaaaacaaaaacaagctccttgttttgatgtgtgctttttgttctattcctcaactttccttccatggtaatattctttgtgttcaccatcagtttataattttcatagaatcagtttgtagtaaactatgtaaaattttgacgctatatccttattattgccaaatttttgatatacaatcttcaaatctgtctttgtgtttgttttttgttaccgtgtttaatttgaaaacaaatacaggggccgggtgtggtggctaatgcctgtaatcccagcactttgaggggctgaggcgtgtggatcacgaggtcaggagtttgagactagcttggccaacatggtgaaatctcgtctctactaaaaatacaaaaattagctgggcgttgtggcatgtgcctgtagtcccagctactcaggaggctgaggcaggagaatcacttgaacctgagaggcagaggttgcagtgagctgagaccacgccattgcactccagcctgggcaacagagtgagacaccgtctcaagaaaaaaagaaaacaagtacaaatgatccctctcattttcagctccatctgtctaccctgtatgtctccaaacccttacatttctttttctcttcagcttcagaatggaaagtgcaacttaaaaccaaagagttagcccttcagcaggatgttttgggggagccaacctccagtgggattcaaatggtaagattaacaaggatacgtcttagttttcacatttagagatgattggggattccattatagaaaatcagaataaagctgggaatggtggctcacacctgtaatcccagcactttgggaggctgaagtgggaggatcacttgaggccaggagttctagaccagcctggtcaacgtagcaagatcttggcgctaaaaactaaatttaattacattaaaagaaaaagaaaattagcagaatgagagctctttgagataagtagcattcccaaaagggataatgactctggagagagactcagaatacgatgacctggggatgcttgaaatctagcttgacacttattgttgtttttttcttagacagagtcttggtctgtcacccaggctggaatgcagtggcatgatcttggctcactgcaacctccacctcctgggttcaagcgattcttgtgcctcaccctgctgagtagctgggagtacaggcacgtgccaccatgcccggctagtttttgtacttttagtagagacagggtttcaccatgttggccagactggtcttgaactcttgacctgaggtgatctgcccacgttggcctcccaaagcactgggattacaggcgtgagccactgcgcccagccaacacttaggtgttttagagttcccctcaagtacacatttgtaactagatagtgagtttttaagacaatttcataaaactctacagacatttgagattagagtagatggcacagcctggcaggagttttttgtcattccgctggaaagaaatcaaaagggcattacttatatgtgtgtaatgaaaatggtaaacatgataataatcatcacagtgttcctctcttcagatgagtggaatctgttaatcaatctgaaccgtcctttaatcatcattcattcctttatcaacagataggaagccacaacggaggggaggtcagtgatgttaagcaatgtggagatgtctccagtgaacactcatgccttaagacacatgtgagaactcaaaatagtgagaacacatttgagtgttatctgtatggagtagacttccttactctgcacaagaaaacctctactggagagcaacgttctgtatttagtcagtgtggaaaagccttcagcctgaacccagatgttgtttgccagagaacgtgcacaggagagaaagcttttgattgcagtgactctgggaaatccttcattaatcattcacaccttcagggacatttaagaactcacaatggagaaagtctccatgaatggaaggaatgtgggagaggctttattcactccacagaccttgctgtgcgtatacaaactcacaggtcagaaaaaccctacaaatgtaaggaatgtggaaaaggatttagatattctgcataccttaatattcacatgggaacccacactggagacaatccctatgagtgtaaggagtgtgggaaagccttcaccaggtcttgtcaacttactcagcacagaaaaactcacactggagagaaaccttataaatgtaaggattgtgggagagccttcactgtttcctcttgcttaagtcaacatatgaaaatccatgtgggtgagaagccttatgaatgcaaggaatgtgggatagccttcactagatcttctcaacttactgaacatttaaaaactcacactgcaaaggatccctttgaatgtaagatatgtggaaaatcctttagaaattcctcatgcctcagtgatcactttcgaattcacactggaataaaaccctataaatgtaaggattgtgggaaagccttcactcagaactcagaccttactaagcatgcacgaactcacagtggagagaggccctatgaatgtaaggaatgtggaaaggcctttgccagatcctctcgccttagtgaacatacaagaactcacactggagagaagccttttgaatgtgtcaaatgtgggaaagcctttgctatttcttcaaatcttagtggacatttgagaattcacactggagagaagccctttgagtgcctggaatgtggtaaagcatttacgcattcctccagtcttaataatcacatgcggacccacagcgccaaaaaaccattcacgtgtatggaatgtggcaaagcttttaagtttcccacgtgtgttaaccttcacatgcggatccacactggagaaaaaccctacaaatgtaaacagtgtgggaaatccttcagttactccaattcgtttcagttacatgaacgaactcacactggagagaaaccctatgaatgtaaggagtgcgggaaagccttcagttcttccagttcctttcgaaatcatgaaagaaggcatgcggatgagagactgtcagcataaggaatgtgggaaaacctaaaggtgtccctgttctctctgaagacatgaaaactcactggggagaaaccctatgaatgtaaaaatgtggaagcaactttgtatctcaggtcttaatgaacacatatgaattcacagtggagaagaccctgcatcagggaatgtggaaatgactttgctgaattctcaagccttaccaaacacatcagaaatctcactggagagaaactgtatgaatgtagagaatctgggaatacctttctgaatcccacaaaccttaatgtgtgtatgtgaactcacattggagagaaaccctgcaatttaaatggtatggtctggatgatgccccactccatatttgtaagccctaagtcctagttccttacactataactgtatttggacatagggttttcaaacaggtgagtaacttcaaatgaggttgttgggttcgatccctaatctgacatcactggtgtccctataagggaaactgaaggaaggatacacatggagaagactgtgtggatccaccagaagatggccatctacaagccaaggacagagacctggaacagatgctttcattatggcctccagaggaaaccaaccctgtctccaccttgatattgcacttccaggctccagaactgtgaggcaataaatttctcttggttaaatcattcagtctgttattttgtacagcaaccctaggaaactaatactgtgaggaacttgggaaaagctttagatcaagcttgtccaacccgcaggccaggatggctttgaatgcagaccaacacaaatttttaagctttcttcaaacataataaaatttttttgtgattattt

SEQ ID NO: 1755 - DNA, 5184 bp, Homo sapiens
gcctcccgagtagctgggtctacaggcgcaggccaccatgcccggctaattttttttcccccagagttgaggtatgttacccaggctgatctcaaactcctgggctccaacaatcatcccgcctcagcctcccaaaaggctgggattacaggcgtgcaccacggcgccgggcccaattcaacttgaggccaatatttccccttatttcatttatctggacgccatgctaaattctaatagttgattcctttgtgtattcaatatgctgatactttttgtaaatgttgatttttttttctttgactaatatattgttttctgagatcttacagtgagttccagggcctcgttgtaaaataccgcgttgtaaaatagcactgatatcaggcattcacttctgcaggagtgattctagtttctccagaaatcgtttttgctgtgctttgtagtgggtggcctttatggagttaataaagttattttgaacactgttttactaacatgaagaactgttcatgtacattatcaaatattttgtgaatctactgaactggtaactattttgcagttaatttttcaactcaaaaagattttcttttttaagtttcctctcttgcattaagaagtcttcataaactctagattacatatagatttcctaattttcttctgcagcatattactttaaaaacattgaaatctttcatactcatggaatgtgtttcagtatgtggtgtgggatagtggatacaatatctctttcctccagaaacacggccaattattgtagtaccacatattgataaactgtccttgatttactgatttcaaattccatgtttattaaactataaattcctatgtatacctgtatctgattctagactctatgccagtaatacatttacttatgccaatatcaagatcataatcttttcattccagtggttttgtatcaactaataatattccgtggtaataataataataatggtagcttttttgtttgtttgtttttgagacagtcttgctctgtcacccaggctggaatacagtggtacgatctcggctcactgcaacctccacctcctgagttctagggattctcctttctcagtctcctgagtagctgggattataggcacgcgccaccacgctcagctaatttttgtatttttttttttttttttttttagtagagatggggtttcgccatgttggccagggtggtctcaaactcctaacctcaggtgatctgcccacctcagcctctgaaagtgctggtgtgagccaccgcacctggcggtagctgttttttaaatcttactaccctaaatgcttaatagacattaaatttttacgctcccaatgatgtggctattattgtgatttttcccttttggtttttagaccagctgtattgagatacaattcacatataaccaacacagttcacccacttaaagctatataattcaatattttttagtacattcgcagtgttgttcaaacataattttggaacattttaatcacactaaaagaaatctttgaatgggaaaacccatttacctcctctttaagctccagggaaccacaaacctactttatcactacagatttttcttttgtagacatttcatatggatatactcatacaatttatttttatttttgtatagacagggtctcactatgttgcaaggctgatctcgaactcctgggcttaagtagtcctgcctcggcctccaaaagtgctgggattataggcgtgagccaccatgcccggcctaaaaatcatacaatcttttgtgaataacttttttcacttagcccgtttttcaaggttcatctgtattatagcctagatcattctattttattgctgaatgatattccattctatgtatataccatatatgatttgtcttcagttgatggacatatggtttgtttccactttgggggtgttgtgattaatgctgctatgaaaattcacatatatctttttgtgcatactggcttttattttttgagaaatcacagctcactgcagcctctacctcctaggctcaagcgatcctcccacctcagcctcctgagcaactaggaccacaggcataagccaccacacccagctaatttttgtatttttttgtagagacagggttttgcccaggctggtctcaaactcctaagctcaagcaacctgcccgcctcggcctccacaaaggcataagccaccacgctcagctggtttttatttctctagagtatatatctgggaatggaattgctgagccatacagtaactatctaagaatttgaagaactgccacactgtttttgaaaggggctgtactgttttacattcccaccagaaatgtatgagggctccaacttctctacgtccctgctaacactttagtgtttttcatgttaactgtgttagtggtgtgaggtgatacctcatgattttgacttgtatttccctaacactagtgatgttcagcatcatttaatgtgctttgttagccatttgtatgcttctttggagaaatttctgttcaattcctttgccccttttaaaatttgttttctggctgggcacggtggcttgtaatcccagcaatttgggaggctgagacagacagatcacttgaggccaggagttcaagaccagcctggccaacatcgtaaaagataaaaaatcagccaggcgtgatagcacacacctgtaatcccagctactcgggaggctgaggcaggagaatcgcttgaacccgggaggaagaggttgcagtcagccaagattatgccaccgcactccagcctgggtgataaagtgagactctgtttcgaaaaaaaaaaaaaaaaaggtccgggtgcagtggctcacgcctgtaatcccagcactttgggaggccaaggcaggcagatcacctcaggttgggagttcaagaccaccctgaccaacatggagaaaccctgtctctactaaaaatacaaaaaagtagccaggcatggtggcacatgcctgtaatttcaactattcaggaggccaaggcaggagaatcgcttgaacccaggaggcggagcttgcggtgagctgagatggtgccattgcaatccagcctgggcaacaagagcgaaactctctatcttaaaaaaaaaaattccattgagttgcaagagttctttatatattctgaagagaggtccttatcatatatatgatttacaaatattttctctcaataggttttccttctctttcttgatggaatattttagaatactaaactatataatattgatgagtgtcctctgaagtacaagtttaatgttgataattttttgtttgcaatgtttttgatactgcacctaagaaaacagtactaaatccagtatcatgaaacttttctgcctatacttctgggaattattgtaggtcttacatgtatgtttaggtctttgatccattgtcagctaacttttgtggggtttttaaatattttaatttttttagcttaatccccaatgtggtatctgttaacttttgtatgtggtataaagtaaaagcccaaatgcattcttttgcagtatggtatcaatttctcccagaaccatttgttgaaaacattcttttcattcttcattgaattaccctggcagccttgtagatctgttgaccatatatgtgagggcttacttctggactctcaattctattccattaatttgtatgtttatccttaagccagtgccacattgttttgattactacaattttgtagcactttatgaaatccaaaagtgtgactccttcaactgtgttcctctttttcaagactgtttggctatttggtgttctttccatttctatataaagtttatgatgagcctgtcaatttctgctatgaagccagtgctaaattaaaaaaaaaaataacatcagtggaacttgttaaagcatagtaaggcagactttattcagtaccatcacgttaggtatagggaccactgcagtaggattttgcagtggaggtgacagagtaggctaactctgaataattatagcatgagcaaatgggaatttatagtcaagttaaagagtaaaggtcagtgagtggaaaattgccaagaggaatatcaggggtatggaggatggtggataaactgacctaacatgatgtctgatcactttggcctgtaattggtagatagtagagaatcgggaacctgatcagctataagggtgatctgatactgagggtggtaggttcttattgtactgacttagcagggttcttgctaaaactcaatatacaaaagtgtacacatgggcctaagaaaagtttaaggagcttgactatagttgagtaaagcaaagactctgtcaccatctggaattttgatagggattatgtttaatctatagaccaacttggagagtactgccatcttaaaaataatgttcagtattcttggtcaggtgtggtggttcatgactacaatcccagcactttgagaagccgagatgggcagatcacttgaggtcaggagttcgagaccagcctagccaacatggtgaaaccccatatctactaaaaatacaaaaattagttgggcatggtggcacatgcctgtaatcccagctactcgggagactgaggcaggagaactgcttgaacccagaggcagaggttacagtaagccgagattgcaccagtgcattccagcttgggcaacagagtaagactccctctcaaaaataataagtattctaatccatcaacatggggtgactttccattacttttcatctttatcaacattttgtggtattcagtatggaagtctcgcacatcttttatcagatttattcccaagtagtttattattttaatactataataaatggaattgttttcttttcttttcttttcttttcttttttttttttttttttggagatgaagtttcgctcttattgcccaggctggagtgcagtggtgccatctcagctcactgcaacctccacctcctgggttcaagcgattcttctgcctcagcctcctgagtagctgggactaccggcacgcgccaccacacccagctaatttttttttttgtatttttagtagagacggggtttcaccatgttggccaggctggtctcga

SEQ ID NO: 1756 - DNA, 270 bp, Homo sapiens
taccacggaatattattagttgatacaaaaccactggaatgaaaagattatgatcttgatattggcataagtaaatgtattactggcatagagtctagaatcagatacaggtatacataggaatttatagtttaataaacatggaatttgaaatcagtaaatcaaggacagtttatcaatatgtggtactacaataattggccgtgtttctggaggaaagagatattgtatccactatcccacaccacatactgaaacacattccatgag

SEQ ID NO: 1757 - DNA, 4751 bp, Homo sapiens
ttattggtttttcatttttttcaacactttatatcgtttattaatgcagtatacattagatctaaaatctgcagtttctaagcacaccatgtttagatctttcagattgttctgcagttttaggttatttctacagaggtacctttaagtgaatgaataataccttctataattcctgaaaatatagtacagagtgaaatgatttaaatataatttaggcacatattgattatgaaaatagattatttctcaatacaatacttctctgtcttggtaaaaataataaagcaaagaaaataattcatttctgaagttgctttcctttacttgtaaaggtctgatctcctcccactatgcatatgtaccctttactgttaaggaaagctttgcatatgtacatatggaagaataagctacataaatactaaagatatgtcattcccccaaaggagacacaggtggctttcaatgattccttgcctcatgttgatgagtctgtagaattcagaacccatttggacacagctaatatccctgcacttggggtagaaataaggacaccaggtcattggtagggaggtacaggcccttcctctgctgctgcagaaagataatgactcaagaaaattgggctaaaatttgtttaaaaaaaaaacaaaaaatataagtaaaagaatcacaggtgctgactgattggtattacatcttggacgagccaaatgcctttatttttactttatatatattttttggtggccgtaatcaaatgtgtgtttaaaattcctcattcccaggccaggcacagtggctcatgcctgtaatctcagcactttgggaggccaagacaggctgatcacgaggtcaggagatcgagaccatcctggctaacacggtgaaaccccgtctctactaaaaatacaaaaaaattagccaggcgtggtggcgggcacctgtagtcccagctactcgggaggctgaggcaggagaatgatgtgaacccgggaggcggagcttgcagtgagctgaggttgcaccactgcactccagcctgggcgacacagcgagactctgtctcaaaaaaaaaaaaaaaaattcctcattccccactgtagggttctagctgcaattatattacattgccttttagcagacaactcaaccatattcattaatataagctttgattgcagtagctctggatttagtatctatttctaagctggccctatgtaaactatttggtatttgaattaaatgaatattaatgatgcaccttggttttttggttttgaagtatcttcctatgcttgtgatgattgtatgagaaaactaggctaatagtgtaaacagacagaattgcttggtctggtgttcagtggaacttgcctagaatgaaattctgagaaattctcatttgtaagtgttgtagtgataggtaagttcttcctccatccagagttctactgtacctttggaatgacagtgatgtacaacaatgtctttctttccactctgtttcaatcagtaagaactggatattactttaatttagctactgttttttcctaaaaagtaaacattgtaaaaacgaacctgaaaagagtcttaaggagtctgatctcaccatattcatacagtgtgacaggtatttaaagaggggaggaatcactaaagcaatttataaacctaaacaacctttaccaagttttcataaagttttaacaatttaaatatccatactgcatctaggtattcaataaatataattgcatatgttgtgctttccataaattaaaatcctcaaatgcatctcaaaccaagatggtatttccacatcatgcctatttaaaagcaaatataatagatactattcctggtcataaaactaggtaaaccctcctaccccgttcaaaaagcagcaatatctagtttccctacatctattaaatgagtgcttttctgttaaaaatcagaagatggaaaaaagtcagttttttccattatgcaccgctgagaacaagcataatcctctaaatgtttttttaaaatttccttatagtgttatttcttctagacaactgagtggatggagaaagaaaagtgataaggaaaatattttcatcttgtagatcttcctccagtccctaaaatttctcatctgacactttgtgacatgtatagtggtgttagcatctcttcaaatatagctcccttcatgttggaccctctcaggttggcttcttgaagatcacacccacacagatcacagttatctaaatcagttcctgccagagtcgctcctctgaggttacagttcttcaactttgcattttttaatgtagccaccctcaggttaattcctgtcatctgacttccttccatatctacacctttcagattaacaccttctaaattggctttaagaccagaaggatcctcaaaattacacagtttcagggatgctccttccacattagaacagagcatctttttatatatatataagttctagggtacatgtgcaccacgtgccggtttgttacatatgtacacatgtgccatgttggtgtgctgcacccattaactcatcatttacattaggtatatctcctaattctatccctccgtgctccccccaccccatgacaggccccccagtgtgtgatgttccccatcctgtgtccaatgttctcattgttcaattcccacctatgagtgagaacatgcggtatttggttttctgtccttgcaatagtttgctgagaatgatagtttccagcttcatccatgtccctgcaaaggacatgaactcatccttttttatggctgcatagtattccatggtgtatatgtgccacattttcttagtccagtctatcattgatggacatttgggttggttccaagactttgctattgtgaatagtgccacaataaacataggtgtgcatgtgtctttatagcagcatgatttatagtcctttgggtatatgcccagtaatgggatggctgggtcaaatggtatttctagttctagatccttgaggaatcgccacactgtcttccacaatggttgaactagtttacagtcccaccaacagtgtaaaagtgttcctatttctccacatcctctccagcacctgttgtttcctgactttttaatgatcgccattctaactggtgtgagatggtatctcattgtggttttgatttgcatttctctgatggccagtgatgatgagcattttttcatgtgtctggctacataaatgtcttcttttgagaagtatctgttcgtatcctttgcccactttttgatggggttgtttgatttttttcttgtaaatttgtttaagttctttgtagattctggatattagccctttgtcagatgggtagattgcaaaaattttctcccattaacagagcatcttgactccctggatatttgcacagtcaagcactgatccagagagatgagctcgttcaagatttgaacagcaaagatttgcatgtgcaagattacagcagcttaaactggccattttgaagtgaatgtatcgaaggtccaaacaagaaagatcggcaccactgaagttcaaaccctggcatcacagttctgacttggttggagttgctagtaaaaatcggacaaattccttttgggatattggtgaatgatcctccagtggttgagaattctttattgccacttttaggtgttcaatgagtcaataccaaaaaatcttgcttcttctaacacacctaataaattaatgctatcatttacaatgagctgtccacgatgcaagtagttcaaaatgggttcaaagtactcaggacttcggtcaattaagaaagctcggccgggcgcggtggctcacgcctgtaatcccagcactttgggaggccgaggcgggcggatcacgaggtcaggagatcgagaccatcccagctaaaacggtgaaaccccgtctctactaaaaatacaaaaaattagccgggcgtagtggcgggcgcctgtagtcccagctacttgggaggctgaggcaggagaatggcgtgaacccgggaggcggagcttgcagtgagccgagatcccgccactgcactccagcctgggcgacagagcgagactccgtctcaaaaaaaaaaaaaaaaaaagaaagctcctctatcatcttgcttacttccccagacacctttgtccttaaacatgtgggccagcatactgtcaggttctttattcactaaagtgctccgtgtagttgtaaagtaccgccctccaacatttaatgtcagccactctgtgtggaatcctaacaatccttcaggaggcttagaatctgtctgaggatcaataaatggctctccttcacaaacaaacaaaacatcatcatccctgttcaaagcaatatcatcaatcagtccacctttcccattatacacactggtggcttttatgccgagtttactgctggccacagaaagcaaatcagataaagttccatatacaacaactacctttccgttcttggggctgccgttcaggaacagggtcatccgcctcatcacgctgcccccactgggtcctgagtgggccaccaccctcccacctggtcctcctcccacctttttctcctcccgcccttccccccctccacccacttggattcgcctcccttcgccacctttctgcccttggggacacaccacacacatgcactctgtcccacacccagggctcagcc

SEQ ID NO: 1758 - DNA, 200 bp, Homo sapiens
aatccatgggaatgaagtatgtgtaagcattgtattaagtattatagagtaatttagagatgatttaaaagataatgggaggatatatgtaggttaaaagcaaataaaagcattttatataagggacttcagcatacttggattctggtgtttagggggtcctctaaccaatgccctgtgaatgctgagggatgactgtg

SEQ ID NO: 1759 - DNA, 418 bp, Homo sapiens
tggcgttgctatgattatttcaaaccatgttcacaggtggaatgaaagaacaagatttgatgtgcattaagcttcatggggtgaacaaggttggtctgaagaaaatcattgattttatttatactgcaaaactttctcttaatatggacaatcttcaggacacacttgaagctgctagctttttacaaatattacccgttttggatttctgtaaagtatttcttatatcaggagtctctttggataactgtgttgaggttggacgaattgctaacacctacaatcttatagaagtggataaatatgttaataatttcatcctgaagaactttcctgctttattgagtactggggagtttctaaaactcccttttgaacgacttgcatttgtgctttccagtaatagtcttaagcactg

SEQ ID NO: 1760 - DNA, 1707 bp, Homo sapiens
ggcttttccggaaggagcggctcggtgttggggctaggccggtattctaggcccaagcccaggcccaggcctgtgttcccggcccttgctcaaagacaggccggtggccgctgcgacactctaggtacagcggagggcgcagcgggccgttcgctgaggtgtccggacccgccgccgagcgggccgtggagccacagtacgtggcggcgcctcttccttgcccgaagcggaactgctgaaggagcggcagcgcaggccggacgaggtgaaccaggtcatttaaccgccttcaggtgatgaatcatctgtctaataatcagatttgaggtccacagccctttgtggtcctgctacagggtgattttcagtggatgactgactggcgtggcccgaggggtgccgcagtgactgccttcccttgataaggaaacgagctttctgttctttctggacacctcgttacctgtaaaacattccggttataacttctttatccggcttgcatctctgtgcaagaggaaagctttcacatgaaagtgtcccttggtaacggcgaaatgggcgtctctgcccatttgcagccttgtaaggcaggaaccacacgcttttttaccagcaatactcacagttcggtggtattgcaaggctttgatcagcttagaatagaaggattgctttgtgatgtgaccctggtaccaggtgatggagatgaaatcttccctgttcacagagctatgatggcgtctgctagtgattatttcaaagccatgttcacaggtggaatgaaagaacaagatttgatgtgcattaagcttcatggggtgaacaaggttggtctgaagaaaatcattgattttatttatactgcaaaactttctcttaatatggacaatcttcaggacacacttgaagctgctagctttttacaaatattacccgttttggatttctgtaaagtatttcttatatcaggagtctctttggataactgtgttgaggttggacgaattgctaacacctacaatcttatagaagtggataaatatgttaataatttcatcctgaagaactttcctgctttattgagtactggggagtttctaaaactcccttttgaacgacttgcatttgtgctttccagtaatagtcttaagcactgtaccgaacttgaactctttaaggcagcctgtcgctggctaaggttggaagaccctcggatggattatgctgcaaagttaatgaagaatattcgatttccactgatgacaccacaggatctcatcaattacgtgcagacagtagatttcatgagaacagacaatacctgcgtgaatttgcttttggaagctagcaattaccaaatgatgccatatatgcagccagtgatgcagtcagatagaactgccattcgatctgactccactcacttggttacattaggaggagttttgaggcagcagctggttgtcagtaaagaattacggatgtatgatgaaagggcacaagaatggagatctttagccccaatggatgctccccgttaccagcatggtattgctgtcattggaaactttctttatgtagttggtggtcagagtaattatgatacaaaaggaaaaactgctgttgatacagttttcagatttgatcctcggtataataaatggatgcaggttgcatcattaaatgaaaagcgcacttctttca

SEQ ID NO: 1761 - DNA, 741 bp, Homo sapiens
taaagtgaacactttttaatgtaattagcacagtgttaaaagtgaacatttcatacaagcaaaaatactgaatacaataaatgtagtagaatcaataattaagtacatgggtaaattaataatatcatccatggtgagctaatgcccctaagaactggatgctttatcatacagttgcttgacattaccaacaagtattgtgacaaatttgattcaatcatttcattatgcaggcagaaaagatagtcttttaaaataactaaacatatgggaatataatgaagagtgtctatagtaatcatttcatgaagacacaagtctgttcctaagctattaatcttacttgcaagtttgatgaaaaaaagaaggatctcatgatttcttgctccaacttcccatgtacagaggctctcttctttcttttccagatagagactgattccttggaagtagctcttcacagcattagggagttgtcatggcctgagagagcccttccacccctaactcattcaacaagcagggctccaggacttcccaatgctgataaaaattcagtgaataatttctccaggccagtttcattccaaccaacctcttgtgttgaataaggtgacaatctgctggagcaccttgtggaggacagtggtagtctaagccttctgaattttgctgccatcccttggaaacaatagaaaacattcaaaacagatgaactgcccatcaacagggcactggtta

SEQ ID NO: 1762 - DNA, 371 bp, Homo sapiens
gagttttgaggcagcagctggttgtcagtaaagaattacggatgtatgatgaaagggcacaagaatggagatctttagccccaatggatgctccccgttaccagcatggtattgctgtcattggaaactttctttatgtagttggtggtcagagtaattatgatacaaaaggaaaaactgctgttgatacagttttcagatttgatcctcggtataataaatggatgcaggttgcatcattaaatgaaaagcgcacattctttcacttgagtgccctcaaaggacatttgtatgcagttggtgggcgcagtgcagctggtgaactggccacagtagaatgttacaacccaagaatgaatgagtggagctat

SEQ ID NO: 1763 - DNA, 2635 bp, Homo sapiens
tataaacacaaaagagcccactctgctttatttacaacacgcaggctgtctgtacaaacagcggccgatattattaaaaacaaaagaggtgagtgagaatcgtcacctttctgctttccttcctcacttggccaggctctagtactccacctttgagctgccatgcccaataggggaagtccaaaattaaaaatacaaccggtgtagaagaaaataaatggggagtgaaatagaagaaaagatgagggaggggagtgctaatatttacactagagttttatagacaactgtcccattccatcccaattccaatcctgacccagaaagtgatggtggcaggtccaagagacagagattatgtgtcgggacacagacagcctcccatccccaaccgtaatggattcaatttcaagtccacagagtggggaggaaggatagggtgggaaagtgagacactcattttcaaacaagtctcccttgagaattcctgccttgaagtgcagacagtatccaagctccaggggataggctgaggaccctgaggctcagttcccaaatcatgttgtcatttggaagttccaggctaaagttggtgccatcagggctctccagatttgggaggcccccctaaccgccgggcctctggcctcagttccttgcatttctggcaataaaagaagtcggggacgttggtcttcttaatcttagcacaggagaggtggatccacgtcccacacaggctgcactcaatcatgggccgccctgcaaagggctttcgacagtaacatgtgatcagatcccatgagtcatcacctggggaaaaaaaggtttgtttggtattctgcctgagctgttggatccacaacaccctcaaacccctcgccccagcccgaacctctcacctgattctaccatgatgtcctcgtccatgacccgcatctcgccttcactggagctggcatctccatcttggcttgtttcagtgctgcccacctccttgctttcactgtcagcaggagggactccttcagggtgcactgtggcagggggcctaggagcctcagggggtgttggcagcacagggactggggcttcaccccctaccactgttgccatctcttcttcttcttcctcttcctcctcttcctcctcctcttcagagtctgtatcactggggggtgcctggggaggcccaggaggtgggagtctatccccccgttctgccttttttaacttccgcttcttgctcttcttgattcgagatctcttttccccatccccaggagttggccgaggcctccgaagcaccccaaagccagccccagctcctggccccaactttcggttctttcggtccttctttcgaggaggatgggagaggtccccctgggaaaggggcacgggggtaagagcagcagggggccgggaggtatgtgtcagggatgtgggggacaaaggagatgccactttgggcccatccagatcaaagagagagtccttgagcttcatcttctcaagcaaggtagcactgtcgggggcctgcagacgagagaaagtggaccttgggggtcctggctgggtgggacctgcttgagctgcccttctcttggatgactttgctttcttaacaaaagtctggatggttcgaagatctgagggggccgagtcccagccatcactgtcggccgcactctctcctcgcaatggagagctggagccagaggctggccagtcactttccttaaaagggggaagagaccagggtcagcagaaccccagtgtcatctcagcccctccacaaacccagcttgaaaaggagtgactggatttaccccaaaatgtcctacctcaaccactaaatcccactgtactccaaaaacttctccccaccccaattcccatcagcatgtcctcttgaccagtccgtgttacctctaccctcaagtctgacacctcaccgctgcccctgcccagggcctgtggaacactgtatcacccagaccggagccgttatgtccttagctctttttctgtatagcctcatttgttaccattttcatctccctaaaatttatccataaacaccttccattcacagcacctcaagactatgccaaaatctcaaccagcgactccaaatcccccttccttttcactgctgttcaagctagctatcccggccatccactccccgcataccagctttcctaccacagccctaagagtctccaacttccctggtcttacatataatttctaagggcctccttctataaagcaatacagttctgtttgaacaacagtcactctatagtcccaccacaccagcctcaagtcagtaattctcttgcccctacctctttgctagggggaatgtaaccagcatatgccaaaacaaaactgcagaatttgttgaaatcctcaattgttctccgccgtttctctggtggctgaaaggaaggagatatggatcacatgcaaagccacacagtttaagaatggcattcccagaaacacagtccctaagtgaggtctagaaaaggggggcggggggcgttgtcaggcagggctactaggctgcaaaggtaaggcaaacctcacctgagtctctggcttaagggtcggaggtggatct

SEQ ID NO: 1764 - DNA, 4682 bp, Homo sapiens
tataaacacaaaagagcccactctgctttatttacaacacgcaggctgtctgtacaaacagcggccgatattattaaaaacaaaagaggtgagtgagaatcgtcacctttctgctttccttcctcacttggccaggctctagtactccacctttgagctgccatgcccaataggggaagtccaaaattaaaaatacaaccggtgtagaagaaaataaatggggagtgaaatagaagaaaagatgagggaggggagtgctaatatttacactagagttttatagacaactgtcccattccatcccaattccaatcctgacccagaaagtgatggtggcaggtccaagagacagagattatgtgtcgggacacagacagcctcccatccccaaccgtaatggattcaatttcaagtccacagagtggggaggaaggatagggtgggaaagtgagacactcattttcaaacaagtctcccttgagaattcctgccttgaagtgcagacagtatccaagctccaggggataggctgaggaccctgaggctcagttcccaaatcatgttgtcatttggaagttccaggctaaagttggtgccatcagggctctccagatttgggaggcccccctaaccgccgggcctctggcctcagttccttgcatttctggcaataaaagaagtcggggacgttggtcttcttaatcttagcacaggagaggtggatccacgtcccacacaggctgcactcaatcatgggccgccctgcaaagggctttcgacagtaacatgtgatcagatcccatgagtcatcacctggggaaaaaaaggtttgtttggtattctgcctgagctgttggatccacaacaccctcaaacccctcgccccagcccaaacctctcacctgattctaccatgatgtcctcgtccatgacccgcatctcgccttcactggagctggcatctccatcttggcttgtttcagtgctgcccacctccttgctttcactgtcagcaggagggactccttcagggtgcactgtggcagggggcctaggagcctcagggggtgttggcagcacagggactggggcttcaccccctaccactgttgccatctcttcttcttcttcctcttcctcctcttcctcctcctcttcagagtctgtatcactggggggtgcctggggaggcccaggaggtgggagtctatccccccgttctgccttttttaacttccgcttcttgctcttcttgattcgagatctcttttccccatccccaggagttggccgaggcctccgaagcaccccaaagccagccccagctcctggccccaactttcggttctttcggtccttctttcgaggaggatgggagaggtccccctgggaaaggggcacgggggtaagagcagcagggggccgggaggtatgtgtcagggatgtgggggacaaaggagatgccactttgggcccatccagatcaaagagagagtccttgagcttcatcttctcaagcaaggtagcactgtcgggggcctgcagacgagagaaagtggaccttgggggtcctggctgggtgggacctgcttgagctgcccttctcttggatgactttgctttcttaacaaaagtctggatggttcgaagatctgagggggccgagtcccagccatcactgtcggccgcactctctcctcgcaatggagagctggagccagaggctggccagtcactttccttaaaagggggaagagaccagggtcagcagaaccccagtgtcatctcagcccctccacaaacccagcttgaaaaggagtgactggatttaccccaaaatgtcctacctcaaccactaaatcccactgtactccaaaaacttctccccaccccaattcccatcagcatgtcctcttgaccagtccgtgttacctctaccctcaagtctgacacctcaccgctgcccctgcccagggcctgtggaacactgtatcacccagaccggagccgttatgtccttagctctttttctgtatagcctcatttgttaccattttcatctccctaaaatttatccataaacaccttccattcacagcacctcaagactatgccaaaatctcaaccagcgactccaaatcccccttccttttcactgctgttcaagctagctatcccggccatccactccccgcataccagctttcctaccacagccctaagagtctccaacttccctggtcttacatataatttctaggggcctccttctataaagcaatacagttctgtttgaacaacagtcactctatagtcccaccacaccagcctcaagtcagtaattctcttgcccctacctctttgctagggggaatgtaaccagcatatgccaaaacaaaactgcagaatttgttgaaatcctcaattgttctccgccgtttctctggtggctgaaaggaaggagatatggatcacatgcaaagccacacagtttaagaatggcattcccagaaacacagtccctaagtgaggtctagaaaaggggggcggggggcgttgtcaggcagggctactaggctgcaaaggtaaggcaaacctcacctgagtctctggcttaagggtcggaggtggatctggaaaagcaataaaagctgagtcaagacactaggaacaatctgtgtaaaactccccctctaaaccccgttgttcctaagtgaaccccctgctctcccaggtccctctgccaggccagcaggcccccagctgtgttggatccgccccggctcccccttccgccccgcgaggggcggagcctgggcgcggcgccctctgaggcctcgctatagcgctccccttcccccaaccggaggcccggcgccccgcccccccaactcacggtctctctcgactccagtctactcggatccctcagcgccccaccccaccgtaccgctcccggggccgcgtccgggccgccgccagccgcccccgtccttcacacgcgcccggagccccgagttcctacccggccgcgctccaccgcctcgggccctccgagaccgcacacgccgcccgccagcccccagggtccaggatgaccacgccgaaccgctccccgccctccggccccttctactcgagcacgcggcccggcgcgcccctcacccccaccccagacacacacaggcacacgcatccaacgctacttcacggccgggacagacccgggagctctaacccggacgcggcccccacctgcccccccacccgcccataccgcgctccccacaatttcgccgtccctccgcccccatccggggctttggcccctccccgtctccagcttttcgggctccccaccgggccccccggccctgttcctagccctctccggccgccgcccccccctccgcccccgtactcaccacccagttactaggctatggacccctcaactctggccccttccccccaaccagccactctctctctctctccacagcagccaccgctgctgccgccgatgcccccctcaccctcagcaactcccaggctcttaaccctcgcggaccaaccctacccccccgcccgacaagtcgccggtcttaaccccccccaccccgccccaccaccccctacaactacccagctcgcctcgcttcctggctcgctctctccacaactaccccccggtacaggtccgtctgccgtagacaatacccagaccccctcttctccccacaactacctgcccacctctccgacaatcaccgggcattctccggcggcaactactcggagctccggtaccaccgccacaaactaccccacctcggcgaactaccgggcccctcactcagcctcttctacgtcctccctcctgagcaactctccggccactggattcccctaaccttccagttccagggccccaatctgccggtggccctttcgggccctaacccccgaggctccgggtttcaagctcctatcccccgcacccccacaccgtctgatctccaactaccccagcccagtttcccactcctctttctccaaggtctctcaactcgtcgctctcccacctccagggccagcctcccgaccccctccccgaactcccccgctgggctccggggctcgacctccaagtttgccaattgattcctcgcccgccccccgccggctcagcgctctgcaccggtcgagagctcaccttcgggactgggctccgccatggcttccagcatcgccccctcccctcctcccggtccggcgcccccctccccggagccggggatcccggtgccgcctctagtgctcgatgctcccactgcttcgctccacagaagtgtccgcctcagcccggttgagactcgagtccgctagccgctgccgccacctccctctaccactgcctcccgcactcccggaccgggccccctccccccgcgccgccggccgcctgctccctcctcctcctcctcctcctcctctctcctccctccctcctcttctctccctcctccccccgccggcgccgaggcgcagtgcaccaagggttttgtagtccgtccgggaacagcggaaaagggaccgcatgaacctccggaactttgattcccagaaagccacaggctggcgcaggcgcaccaagccgctcccctcccccggggagcggc

SEQ ID NO: 1765 - DNA, 564 bp, Homo sapiens
gtctccccaaccccaccgcccccagtgctgctacccgccatggtctcgcccgcgcgctcccgggctccaccgcccacccaaagggctaatggcccctgccgcgcctgcgcacacccgcaaaccgacgcgcgagcgcggacaggactgacccagtacgggagagaagcaaaggggaaaaagcacggatctgcgagggtggcggcggggggcgggccgcggggtgcgactcaaagccccggtctcagcggccgccgcgcgccaccgccaccgacgccgcgagcttcctccaggtacccgcccacctctcctcatgtcacgtgacttaaaggcagccaccccgcgctcctcagccgccctccgtcacgtgatcccctcccaatcacgtgaccgtctgactccgcctagtgcccccgccacatgatcgctgccttcagcaacggtctcccagcccccaaacgtgtaccccagccgaggtcctctgagcacccaggctaagctggcctgtgccttcaggaaacggaccatcggctcccaccccgctttaccccacccacgatggagcac

SEQ ID NO: 1766 - DNA, 14918 bp, Homo sapiens
gcactgtggacgatgagtcagggttaggggcgccaggacgtgggcgtgcaggacgcgggcgtgcaggacgccagagctgggtcagagctcgagccagcggcgcccggagagattcggagatgcaggcggctcggatggccgcgagcttggggcggcagctgctgaggctcgggggcggaaggtctgtgtgtgacaagagggacggtgggcagcggccctgggcaccgggccggcactgaacccccactccccacagctcgcggctcacggcgctcctggggcagccccggcccggccctgcccggcggccctatgccgggggtgccgctcaggtaagtcaccgcagccttggcaagggggtgtgggagcggcggtccgcttcggcgcccgccatcggcagggatctccctcttggtgccaggtacctgcctactgctcagtcgccgaaagtaggggaaagggcaagccagggtgccctagggcgaaactaggggaaaggtcaccgcttcgcgccgcctccccgcgcggctctcgcctgttctccccttgacacagcggaagtcccttccctgaacttgctaaccgtctcttttcccagctggctctggacaagtcagattcccacccctctgacgctctgaccaggaaaaaaccggccaaggcggtaggtagccccgaggccaggtggaccttagccagacccaaccagagccctgaaatttgcctctctctgcccaggaatctaagtcctttgctgtgggaatgttcaaaggccagctcaccacagatcaggtgttcccatacccgtccggtaagggaagggataatcagagctgggtggggccagggtggtttcccctgccagcctggcctgaccagcctgtcccccaccctctgcagtgctcaacgaagagcagacacagtttcttaaagagctggtggagcctgtgtcccgtttcttcgaggtaaggaatgactcggggcttggtccctggtgaggtgtttggagatgttaagctcaaaaggagcctggatgtgggatcctgtgccttccccaggaagtgaacgatcccgccaagaatgacgctctggagatggtggaggagaccacttggcagggcctcaaggagctgggggcctttggtctgcaagtgcccagtgagctgggtggtgtgggcctttgcaacacccaggtgagggcgccctatcgccacatcccagtatgccataccccagcttggcagactcagctcttttgccatagacctagagactagggctaaggtctcttctaagcacctgccctgggtgcctgtgggatggatgttaactgtccaaacataacacaatttacatgcagtcccctaggcctgagccatgggcctcaccctggttcccaagtccttacaaatctctaagttggggattgcctaacaatagactgactagtagcaagtcaccctcctacctagacctaagacagaccagcattctctgctgtgccctttgcacaccccacttcttttctacacactggggatggcccaggtcaggcactgccctaggccaggaactgccctgttgcccacactctcctgttaaggtcaggtccccctgcagccagtgacaaccccagattcctgcttcccctccagtacgcccgtttggtggagatcgtgggcatgcatgaccttggcgtgggcattaccctgggggcccatcagagcatcggtttcaaaggcatcctgctctttggcacaaaggcccagaaagaaaaatacctccccaagctggcatctggtgaggcaaccctaggagagccagggattggggggcacactgggcttggcacagattaggccagttggcacttagattatcagatggctgagcatttcagttgggggaaggttttggggaggcatcacagtgtgctggttgggacatgcaaaagaactggatactcccaggtgttaagggggaactgcctgctggagggatggggaagtgggccgaggggactttgaagctcatcagaacttggggtaaagtagctctctccccaacaggggagactgtggccgctttctgtctaaccgagccctcaagcgggtcagatgcagcctccatccgaacctctgctgtgcccagcccctgtggaaaatactataccctcaatggaagcaagctttggatcaggcaacctgcctcccatttctccccttctcctccgcccaattccaggccccactgctccccgtcctccacgccctgaatatcccattcttccacagtaatgggggcctagcagacatcttcacggtctttgccaagacaccagttacagatccagccacaggagccgtgaaggagaagatcacagcttttgtggtggagaggggcttcgggggcattacccagtgagtgaatttgggttgggggagcttaggactgaggggcaggactgggctcctgggcagatggctgttgcaagtcaccctggggacgtgtgcaaaagccaaagcaggtggactgaatgtggcctttgggactaatatgtatgcaactgagctaaagttttggctccagcaaccaagtccaacacaaaataggacatagccaggcctccttagccctcagggcctgaggggaagtggtggctgtagcctctaatagtctagtggtcgtcattcctccctggtgcataaggagcgaaggagcagtttttcccccagtgacaacctgttgaacacacctctgctttcccacactgccctgacacagtgggccccctgagaagaagatgggcatcaaggcttcaaacacagcagaggtgttctttgatggagtacgggtgccatcggagaacgtgctgggtgaggttgggagtggcttcaaggttgccatgcacatcctcaacaatggaaggtttggcatggctgcggccctggcaggtaccatgagaggcatcattgctaaggcggtgagtaccctgcccgagtccctaggtaacccaaacagaagtctcactgtcccccttgccatgtgtccctgatcacttgcaggcactccctacactagaaactcctcccctaccagcagcccgacttgctagcttaggtctccatccagcgtagactgaactctggttgtatgcaaaacccatccctctggcgcaagcccagcccctctcctagggagactgcagaaccacactgaaccacagcgggatgtgtggaccctcttccaggtagatcatgccactaatcgtacccagtttggggagaaaattcacaactttgggctgatccaggagaagctggcacggatggttatgctgcagtatgtaactgaggtgagggcctcccaagcccctctccctggagccctggggctttcttcccagtcgggtcagactacaacccccagcagcacctggggcagtgggtctccagctttacaccaatgccctaggggatgcggggaggcatagtcagctcagcttctgcgaagagagacagcaatgatgttctgctcaggtgcctgccagcagtaccagaagttaattctacctcatcccttacatccaccccttttaagaaaacaaatacctggaagcacctgatgaactgacccagaacaagtatctgcctgacctgacaagctaggtcagcccttatcttggagatctgggtgatgaggccaagtctgacaaagccctttgcaattttccttcccatgtcccaactatgcaacctcagtccatggcttacatggtgagtgctaacatggaccagggagccacggacttccagatagaggccgccatcagcaaaatctttggctcggtgaggtcccaggcatgctgggagggagtccagtttgggtgctcagctcccaaaaccagtctcatctgttctttgtccctaggaggcagcctggaaggtgacagatgaatgcatccaaatcatggggggtatgggcttcatgaaggtacaggacggtcttctgcagagcctcggctgggccaggggtgggtaggcacatctcagcacgggcatataatttgtgtggccctgtgctaggaacctggagtagagcgtgtgctccgagatcttcgcatcttccggatctttgaggggacaaatgacattcttcggctgtttgtggctctgcagggctgtatggtaagacagagaattgggtgggggtagaggtggggaggacagtgagtcctgactgctggaccctcttcccccataggacaaaggaaaggagctctctgggcttggcagtgctctaaagaatccctttgggaatgctggcctcctgctaggagaggcaggcaaacagctgaggcggtaggcttagggccagagccaggggagggcagggtggtgtatggcaactaaccagtcattctccctcttcctctcaggcgggcagggctgggcagcggcctgagtctcagcggacttgtccacccggagttgagtcggagtggcgagctggtaagcggccaggggtccaggagagcctgcatcagggactgcagccgatggcccctctgagccccgcactgtccccatctcttaaggcagtacgggctctggagcagtttgccactgtggtggaggccaagctgataaaacacaagaaggggattgtcagtaagtgagctctacaccattccgcccctccctttcctctccttgagactaatgcccccacccccacccccaccccacctaccggacagatgaacagtttctgctgcagcggctggcagacggggccatcgacctctatgccatggtggtggttctctcgaggtgaggaggcaggcagggaatgcctgagccgcagggggcctgggcctggatcccagccggcccagatttattttcatctcctgcttcctgccagggcctcaagatccctgagtgagggccaccccacggcccagcatgagaaaatgctctgtgacacctggtgtatcgaggtgagactcggggctgccaagctcaggtgagggctggaggtgcaggcccaacccctccttccctctccccaggctgcagctcggatccgagagggcatggccgccctgcagtctgacccctggcagcaagagctctaccgcaacttcaaaagcatctccaaggccttggtggagcggggtggtgtggtcaccagcaacccacttggcttctgaatactcccggccagggcctgtcccagttatgtgccttccctcaagccaaagccgaagcccctttccttaaggccctggtttgtcccgaaggggcctagtgttcccagcactgtgcctgctctcaagagcacttactgcctcgcaaataataaaaatttctagccagtcatgctttgctcctgtgtgacggttctttccccctgctgcctgcctccctcccaaagaaaggagccagaggcgtggggagtttgcctctattgctttatttggtgttttatacaagtgactaaaataaatagagtaacaaaggcagctacatggcccaaatctcccagcttcctcaggctgctgtctaggatgcctaaccccggggtaccgctgaccacccccaaccctgcaaagggcagggctgtgggtaactggaggaggaggtcacattctggggttagaaggggcccaatggatgggaattcttcatataaaagaggaaatgcctattaaaaaagtcccaaaaatgtaagaaactctattttaacccccaaaaaggcttataaaaaaacaaagctaaaaataatcaaaggtcccttgtctacccctgagggaagggggaggaaccaggcactgctggtgagagtcacagtggccacaatctcctgtatggcagcagctggtaggctgagcccaggcactgtaagagcaagcacatgacggccaggacacccagtcacacaccaggagcgcccggcccagcctggccccacagtgggctacataacatccacaaagaactcgctgggattgcccatggccatgtggaagctttggcggctggctgtcagttctgggggcacagagcccaggtctctgactggaggggcccccggaggctgcactgctggagggactggaggtggaggtgggggcatcatgaccaccatcatggggttgtaggggagggccatgccagggggcggtccatagggatggagccctgggtgggctcggagattaggggcacccccagttgagcctctggatggaggagggcccccatcgctagtcccacttgcttccccaccccgccgaaggctgccccctcggctggagggctcagactcactgccactgccggacttggactcgggggcccgctcctcgggcctccccgtgcgccctgcccccccatcactccgtgtcgacccactgctccggctgcctgtggagggaggggaggggcaactgagtcctcacccaggctcctccctggctcccctctcatccaccctcagatcctggccgtacaggtatgtggggatgacttaccctcactatgctggctgctggcactgcccccaccataggtgtaagatgaaagctcatggtagggtggaggctgcgggctgtaggggtgtggggcagggtactggtaggagaaagtgggcagcaggggccagggggtggccccaggcagaggagccagggtatcctggtctgaagccccactggagccatcgttgtcattgagagacaggttgactaggtctggaaagcaagggaggagaggaagaaatcactgcttcaagaggctagggccccaagacaccgaatggagaggaactgggaacagttctcccagacccacccacgatggggctcaaaacaggggttcacaagggtctctgacaagaaactcccatctacttctgccatgagggcaggggcacagccactagcccacgtctttgcgggactcaggtaagaggtgcaccttcccccggtggacacagtcctgcacctggcacatggcttgtccagcagcacatgggtggacgtcagcccccatcctcggccagtgcaggacctagtgcgggacacacactgctcgaccatccatggtggccctggctgcggtttctgggctaggtctagggttggagaggcagaacaaggtaggcaaagccacactcccagagttggggcagggggacttacagctctcacagccaccactgaggtctccgaagacgtaatagcactgctcagagaaggtgatcttgttgacggtgtgtcggatcaggcctgctttgagcagcccgctggcatacttgcgggcctcccgccgctcaggaaagccctccacgtgatggtagagccagtcaaccacatccgagcctgggagcacccacagtggaaaaaggcctcaggttcttcttccaactcctgctctcgcctctgcctgtgccattcctggctttggtcaccacctcctccccttctccagccacctgcccaggacccagccatacccagaaaggcattagggatggtgatcttgagccacatgcggtcccggacttccagtccagactctggagctgccatggccttggtcaccgatgccatgtccgtatggacggagagaccccggccttcacagcctggcagaggagacaacgggtaaccagagtcagggatcgctcccacaagggcaatggatcagaccactgcgggacagccttctgctgggagggtgggatgaggtgggctggcggctcaccatcaggcaaagacgatccagatgtaatggtgctcatggaggaggaacctggataggctgggaaggtgccagtcagagccgcggaatgggacacccaggcagcagggtcaattggctggatgggctcatctgggacaaagatggcaccaaaatgacccattctcagtccccaaaagccagcccagtccctccctgactcagcctcctgttccacctctgcctggaccctcctcccacccattccccatgaccacaggcccggccccagcctcctgggcagcccccacccccaacttcaggcccctccctgagtgtcactcacttcgggggagagtgaaataggcctgaggagagggatcccagcacttggccacagtcagcacaatggggctatggggaagagaagtccagtcaagggcgcaggggaagaggaggcctcaggagggcgggggtctgaagcaaggatggattaagagacacaaagagggggagaagcaagcacatcgcggctgggctagagaaggtgagggtggaaggcaccacaatgtggatgactcatcaacatggaaaactcttaaaaacatactgccaagtgagacaagagagtacacgctgtacagttccattcacagaaagtccaaaaacaggtaaaacgaaactgcagtgttcaaggatacgtgcaagggtggtaactatccagtgaggcaaagcttttctttgttatggtgatggccaaagaagtcaggagagtgactacccctggggcagtgaggcatttgggagcaggaagggacatctgaggaggaagttctagggtatcagcaatctcctatttgatgatctagatggcagtgacatggatatttactctagtattatttgctatgtcatgcatttgtttcatgtactttgaacgttatgtcttagcacttttttttttttttgagacggagtcttgctctgtcgcccaggctggagtgcagtggcgtgatctcgtttcactgcaacctccaccccccagggttcaagtgattctcctgtctcagccacctcactagctgggactacaggcatgtgccaccatgcccacttaatttttctatttttagtagagacacggtttcaccacattggtcaggctggtctcgaactcctcacctcaggtgatccacccatctgggcctcccaaagtgctgggtttacaggctcgagccaccacgcccggctgtcttagtacttattaaaattccaaaacaaaacatgaaagagaaaaaaaaagaggactgaggaccggcaacctgcttggcaactcacccaggcttgtgcacaatgtccctcagcacccgcacagcgtcatcgttgctcatgttctcaaagttcatgtcattcacctggaagcgacggcaagtgggtcagagacacggtgggagaggctgagggcccccgtgcagggcagctcagtggccctaccccagcacacctgcaaaagcatgtcccctggctcaatgcgcccgtcggccgccacagccccacccttcatgatggagccaatgtagatgcctccgtctccccgctcattgctctggccaacaatggagatacccaggaagttgtacttctctgtggagagaggccatgtgaaaagaggagcccctgccacaggacgcccggaaccctagagaccaggccctccccacgccctagccacaggctctccccatacccatgtttagcgtgactgtgatgatattgagagacattgtggaatctgtgacgctgctgaaggatgacgtctgtggtgggaaaaggagccagagtgcccttcaataacccagggtcaaccctggggtgctgccggtgtcctggcaccgcccaaaccaaagcccatgccccaccttctcccagcaccagccttcctgtaggaacccctcaccctctccaggcggggtggcctctgcttccttcgccgccggtggcgcttaaggaggcgggaggcactgctctgctccgtggagctgctgaacctaccaggaggttgggaaggagagcaaacgtaggccaaagtggtcatggggccaagagaaagaacaagaggattgactggaagacgagacggggctgggtgcgctggggagagctgtgcggagccacacctgctcatggtgtcctcctcgtccgagtcccccaggctggtactctccagctcgctggtcatgagggtagaggagctctcgtatccggccaggtggcgctccagccttgaggggccaccagtcctgtggcccccagctacatatggacaggaagctcaagaaccaagcttccccctgctcaccccaccaaggctggggtctggcccagcccttcccggcccccaggcctgcccctcaccgccatgctcactgctgtctctcctgcgaggccgctcccgcctcagtgacactactgactcggtttctgtctcaggctccagattctcatggctgctggacacattagggctggacaggcagagatggtttccaacccacatcaggagaacagggctccggatcctaggcgtcccctaccaaaggcctgggttccctcctcacctccctcccctgcagtcaagaatctgaaggactcactggaaggatggaggccttgagtccccaatgccgctggtcctctcgggtggcaaaggaggtaaaggtggggctggaggcgccagttctgcccgaggctcatggactggaggggccatctcgggttggggattatctgaggacaccagctagaagggtgcaaatgataaacagtggctcacttgggagtcagggtgtgacaggtggcagtaagtgaaagaatgagaaagggtctcagagagctggagaagagcaaaaaaacctagcaagtattagagactccagaaggagaaggctgagggcctctcgccggctctccaaacagacaggaggtaaagagccagggctgctaacgcgcggcctggggaggatacagaaacagactgaggcttgagggagcttggcaatgctgagggggcctggtcctcggtgtcagaacctcttacccaggataccacccttccgttgaagcaggggaggcgggcgttgtcatctgaaatttcttccttcaccaccctgccaagcgacaaggtagaggtcagtgagctggaccaaccatccccaccccgacccccatcaaactttctcccaatcttcacctggctccaggatgttgactttctcctgccctgttcaggtcttctcttacattgaaagaactcactccgacacctaagaaatctccaaactcaatcccctttccttatttctcctctccctaacgcaccctcaggggcacagtgctgctccaaagacttccttgagtctgactcaaacctcttagtccagtttcaaaagcaatcccgcacgctgatgcggctgcctgagatacctatctaatgagactggctggtggcctcctctcaaccccacccctgttccttacaaaccttccaaaaaggtcaggcacggtggctcacacctgtaatcccagcactttgggaggctgaggcgggcggatcacctgaggtcaggagttcaagaccagcctggccagcatggtgaaaccccatctctactaaaatacaaaaattagccgggcatgatggtgggtgtctataatcccagctactcaggaggctgagatgggagagtcgcttgaacccgggagacagtggttgcagtaagtcgagatcgcgccactgcattccagcctgggcggctcaaaaaaaaaaaaaaaaaccttccaaaaaaggctttggtcctcatcaaagcctctactcttatactttcctttagttttctctaattcatttctagaagactgtcctttcttgagtaaaaacacccattagaggccaggcgtagtgactcacacctgtaatcccagcactttgagaggccaaagtgggcagattacctgaggtcaggagttcaagaccagcctggccaacatggtgaaaccctttctctactaaaaatataaaaattagccaggcatggtggtgcacacctataatcccagctactccggaggccaaagcaggagaatcgcttgaacccagtaggcgaaggttgcagtgagctgagattgcgccgctgcactccagcctgggcagagtgagactccacctcagaaaaaaaaaaaaaaaaaaaaaccacccattggatcaaacaaacaatggaagttcctcattagactgaaagctcccaaggagagggcaagctggggttcccattcccctgtgcctcactgggcacaaaattctgcacaaagcaatctgctcaacctgacagatcccaaagcccagccttggggtcatctctccaatgggttccctgtggtggaccggacttgccccttcttcttgaccatgacatcaaaccatgaacacttactctggtcaacaccatgtcctagccacacaccacacactgacacttaagcattaacaaatactgtcgactaaatgaataaacgtataaagcatcagactctctaccctagttgttcctctctctctttccacacacaaccttagccccaaattaggacaccttgtctaattaacccgttagcctaatatggtcatgggagccaggatatatatcaacataatccatttgctgtcaacgtgacaacacagcccagtcactactaacccgtctcagcataatgtaggattcttcccaacataacacaatctcagcacagcttggtccactctgaggcaaattattctgtatcaccataacctactttacagagtggtcagcctcaatgctaattacaattaccattcaccaagaatttcccgtgtgccacacacgtgaactaaccatttcattctgtgattttctccatgtcacagatgagatcaagacacaaaatttaaataaattgtccaagattacattgctgacaactagaaaaaccttgccttaaagccaagataactcccaagatagtatcagcatccccatgtcaaacaatctttctagctagagtccagtttgttcagttcttctaaaacccatgctatcccaacttaatccagcctgccttcaaaaaagcagaggttgggccgggcgcggtggctcacgcctgtaatcccagcactttgggaggctgaggcgggcgaatcacgaggtcagaagtcagagaccagtctggctaaaacggtgaaaccccgtctctactaaaaaatacaaaaaattagccgggtgtggtggcggacgcctgtagtcccagctacttgggaggctgaggcaggagaatggcgtggacccgggaggcagagcttgcagtgagctgagaatgcgccactgcactccagcctgggcgacagagcgagactgtctcaaaaaaaaaaaaaaaaaaaaaaaaaaaaaaaaaaaaaagcagaggttgaggacccagaaggctcagccccaaagaccataaacacaaaagggctttctctgcattatttacacgccaatctagtccaagatagccctgaatgtcccaaattaccctaggatagcccaatctattctagcacagcctacaatgcccccacacgcagctgtctgcaccagtctagattggaacatcccaatacggctgcctgtgctagcacaggccccaacagccttgtctgcccctataccgagtgctccaataaaaccaagtcttgccccaagagaaaccaggattaaccaatacaacccagtagagtccataatggcccaagtgttttttgttttttttctgagacggagtctcgcactgtcgcccaggctggagtgcagtggcgcgatctcggctcactgcaacctccgcctcccaggttcaagagattctccctgcttcagccacccaagtagctgggactacaggcgcgtgcccccacgcccggctaattttttgtatttttagttagtagagatggggtttcaccgtgttagccaggatggcctcgatctcctgacctcgtgatccgcccgcctcagcctcccaaagtgctgggattacaggcgttacaggactcctgagaacgtactaaacaaccagacaatggatcaatttactcagtacagactagaatactccaacataaaccagtatgcccccacctattccagtaaagcctaatcttgtctaatctggtttaggatatcctagtctgtccgtgtgcctcaatctatccaagcataaccttgtccatcctgggatagtcaacctacctcagcatagtacaatctgctccaccataggccagaaaatcccagtgtggcccaaagtagacgtgtgcccctccatgtcgcccaatccactctagcaaagcccccgccggtcctatctaggccttgcgctcacccgaaatcctgatccatagacttgaaaaagtacttggcgcccgcgggccgctgcaggacgctcttgaaatcgccgagggtgatgcgctcggcggggacagggatcttcaccaggtagggagtctcttcctcatccaggtggtaaatcaccttcgtctccccaaccccaccgcccccagtgctgctacccgccatggtctcgcccgcgcgctcccgggctccaccgcccacccaaagggctaatggcccctgccgcgcctgcgcacacccgcaaaccgacgcgcgagcgcggacaggactgacccagtacgggagagaagcaaaggggaaaaagcacggatctgcgagggtggcggcggggggcgggccgcggggtgcgactcaaagccccggtctcagcggccgccgcgcgccaccgccaccgacgccgcgagcttcctccaggtacccgcccacctctcctcatgtcacgtgacttaaaggcagccaccccgcgctcctcagccgccctccgtcacgtgatcccctcccaatcacgtgaccgtctgactccgcctagtgccgccgccacatgatcgctgccttcagcaacggtctcccagcccccaaacgtgtaccccagccgaggtcctctgagcacccaggctaagctggcctgtgccttcaggaaacggaccatcggctcccaccccgctttaccccacccacgatggagcac

SEQ ID NO: 1767 - DNA, 2295 bp, Homo sapiens
tgagcatttttaacatttagtttcacatgcgtgttataaaactaaagtttcaagaaataatcctcagtattccattccatcacaacaaaagcaccctctttttgcagacagggaaaagcccaacatgaacagaataaaccaaaatatacttctatccctccagcttgtacccagtactcttctttccccaccactgaaacccactgacaccttggaaagacttaaaatcagcgggacgaggggagcaacacaaggcaaaattcagttcagcttggtggtttcctctttattgatgtgcctcctaccttccccccacaatttcagtcccttccaactacccccaaaaaagaaggtagtgaaaggaagggattgctggggttctgagccccttgggcagtcagaaagggaacagaaaccaaaacaatcactggatgtgacacagactgacaatcaagaagtctacagcaggatgggaaaggcgggcagagaaaggggaagaaaggagaaaggagagttacaagatgccaactccaccattacccctcctaagagaggctggagagaaagccacaaacattaagaagtgccggtcctgaataagggaggtggtgtttgagcttgaaggaggaggaggtcaagaaaggggggccacctctctctttgtagaatgagacccccctccagctcaggggcagcagcttcacagaccgtagacactttcgtcactgtaggcaatgtagagaaagaagtcttcttcatggtgttcctgggatgaaagcagaaaactgttcagcaactgggctccagtaacttaaaccaaccacgacccagacacgttcttctagaaccacaaaccattgcctgactccttcactgactccaaggcctaccacacgagcagtataatctctgcagtcctgggcaaaaaggcctcaaactgttttctgctgctttggaatggggagggggactgggaagagtcccgaacagatagtttctctagctcactgttctctttccttctctctactcctactgttctgtccaaacccccaacccacggctattatgaaactttaaggcaagccaggaagctagtccaaaactactgatgtaacaacactttcttcccctcacgctcttccaagattcctctccaaagcctccaccacttcccagtcaccatacctggtacagctgacccattgtggcactggtgggtggaatgacattgttgacaaagaaaaacaaggcatcctcagctcggagatgaattcgcttccggatcaagaagtagaactgaccaactgcaaaagatacaagatgcaagaaagtcacagaggtcaaaaatgccctcaaaagaacagctgctaggtggagcctcctcccgcagagactgcactcccacccacaggaagcaagcctgagtcttggatcaggttcccacctgtgagatcagaaggcaccaggtatttctttttgtccaggtctcctatccgagctttgggagccttttctactatcacctgataaagagatgaaaattaggagacagaaggaatgcagccccgaagctgcacctgtcaagaactcaagaaacaatattcctagcacctaaatctaccccagattcatctctttgtctttgtacacgcggtgcagcactgagtcccagagatcctgacctcactgactggagctcatttaaatatccaggatccatcccccaatagggcgtcaccataaacaactatcttagacggaggtgacttgtttgggtcgactagtgattcaatctcgcaaccttagctagctggggggatgaccatttgaagctcaggctgtcaaactctctaaggcctcaaatgctaaggtttctctctcctgtccacatccctctcaaccccacatccaccactaccccactcctttcatcctgggtcccaaggacagcagtttcaggctcgctgccaaccccaccacagccagcagcctgatccctgcgctgcctgtcccagatccaaggccaggctgtggcgtcagcgtaagcgtcccgcgccctcggccctggctactgtcctcaccggcacccggtccgggtatttctttcggatcttctcgccctcagagcggcgcttctcgaacggatgctcttctttgtacacgaacttcatcctcccgggaaccgggctggacagggctgggctgagggaacccaggggggccgggacggggggcggcgacgacggcggcgacgcgcgggcggattcagcggagcgatccacgaatttgcgc

SEQ ID NO: 1768 - DNA, 9566 bp, Homo sapiens
atggcttcccttccgttttcgcgtggttcttttgcaaggtgggttgaactcatttcagtatataacaggcacagagtactcgcagggagggctctgggcaatcaagttacgttggagcccaacctaaaccagccggggtggtggaggaagccctttaaccgtggaagcctctagtgtggacggccagttgttatcggaatctcaggcccgtgggtgcatgaacagcagaggagggtatttgagtgcgcacgtgagagaatgttgtatatgtcagatggggaatgtttgagagtgtgtgacagagaaactgcgtgtgagaggctgggatgtgcctccttgacggtgggtgcggttgtgaggctgtgacaggtgagtgagtggctgtgcttgcgtgacggggatatgaggtgcttgtccttttcatgtacgttgattgcggtggcactgcggtgtcactttgagtcttggctgtaggttcccggctgctgcttctctcctccctcctcacagctgcttgcggctgacacacacaaaaaatgtctgcaagagggaagttggatactgaactctacatcaagttttccagcaagaaggcattgacttgctgtgagattggaaacgcctgggaggttatttctttgtgagctctgagagcgagctacctgtctcagaacctcgtctttcccagagctctgaccccaggaacctgctgtgaactcatacccagattccagcctctctcctacctccatgtgttaaagtgtgtgaacagggaaggcgtggagggtattgtgtaaggaggcattccgtgcttcaaggaaaggcctgataactcatgatttttttctccctccctggtcctgctattcctcaaaaggactctaatgaggaggaaaaaaattctttcacatctaaaactcaatgtttaggctagttggcttttttctttcctaaggttactggttttagagtatgttttacttcatctgaaatgtgtctgaatgtcctaataccaatctgctttctttccagtagatgttgggagccattgagctgaatctcattaacgttctcatatttggccgggtgtggtggctcacgcctgtaatcgcaccattttaggaggccaaggcggacggatcacttgaggtcaggagttcgagaccagcctggccaacatgacgaaaccccatcactactaaaaatacaaaaattagtctggcgtgatggtgcatgcttgtaatcccaccatcttggccaggctggtctcgaactcctgacctcatgatccacccgcctcggcctcccaaagtgctgggattacaggcgtgagccaccgcacccagccttatgtggattattttacttcatcttcagactattttatatgctaaatgacattttctcccaatttaccaatgagactttaagacacattttattaagtatcagagcttaaatctgaaagtcatatcctaaaagactaacaacagaatttgtattagttacttcaagagaccacctcttaaatattactttttttttttttttttttttgagacagagtctcgctctgtcgcccaggctggagtgcagtggtgcgatctcggctcacttgcaagctctgcctcccgggttcaggccattctcctgcctcagcctctccgagtagctgggactacaggcgcccgccaccacgcccggctaattttttgtatttttattagagactgggtttcaccgtggtctcagtctcctgacctcgtgatctgcccgcctcggcctcccaaagtgctgggattacaagcatgagccaccacgaccggcttttttttttttttttatgacaaaggcttgctctatggccaggctggagtgcagtggcgcagtctcggttcactgcaacctctgcctcctgagttcaagcaattcccctgcctcagcctcctgagatccattatatcattattatgtctttgcatcctcatagcttagcttccactcataaatgagaacatgtaatgtttggttttccattcctgagttacttcacttagaataatggtctccaactccattcaggttgcatccaatgctgttatttcattcctttttatggctgagtagtattccatagtgtatatatatgtgtacgtacaccaaattttctttatccacttgttgatgggcatttaggctgttgccatatttttgcaattgtgctgctataaacgtgtgtgcaagtgtctttttcatataattacttctgtctgggtgcagtggctcacacctgtaatcccagcattttgggaggctgaggccagcagatcacttaaggccaggagttcgagaccagcctggccaacatggtgagactcctgtctctatcactgaaaaaaaaataaaataattttatataatgacttcttttcctctgggtagatacccattagtgggattgctggatcaaatggtagttctacttttagttttttaaggaatcttcatactgtttgtcatagtggttgtactagtttttgttcccaccagtagtgtagaagtgttctctcttcaccacaccatggcaacatctattatcttttgattttttaaaattatggtcattcttagggagcaattggtatcacttgtgatttttattggcattttcctgatcattagtgatgttgagcttttttcatatgtttgttgaccatttgtatatcttcttttgagaattgtctattcatatccttagcctactttttgatgggattatttgtttttttcttgctgatttgtttgagttccttgtagattctggatgtcagtcctctgttggatgtacagtttgtgaatactttttcctatcctgtgggttgtctgtttactctgctgattatttcttttgctgtgcagaagctttttagtttaattaagtcccatctatttatctttacttgtgttgcatttgcttttgggttcttggtcatgaactctttgcctaagccaatgtgtagaagagtttttccaatgttatcttctagaatttttatggtttcaggtcttagatttaagtctttgatccatcttgagttgatttttctctaaggtgagagatgaagctccagtttcattcttctacacgtggcttgccaattatcccagtaccattttttgaatagtgtgtcttttccccactttatgtttttgtttactttgtcgaagatcagttggctgtaagtatttggctttattctgggttctctattctcttccattggtctacatgcctgtttttataccagtcccatgctgttttggtaacgattgtcttgtagtatagtttgaagtcagggaatgttatgtctccagatttgttctttttgcttagtcttgctttgaccatgcgggctctttttttgttccatatgcattttaggattgttttttctaattctgtgaagaatggtgatggtattttgatggaaattgcattgaatttatagatcgcttttggcagtatggtcattttcgccatactgattctacctatccatgagcgggggatgtgcttccatctgtttgtgtcatctatgatttccttcagcagtgttttgtagttttccttgtagagatctttcacctccttgattaggtatattcctaagtttgtttgtttttgttttgttttgttttgtttttgttttcttttgtggttttttttttttttttgcagctgttgtaaaagaggttgagttcttgatttgattctcagcttagccgatgttggtatatagcaatgctactgatttgtgtacattaattttgtatcttgaaactttactgaatttatttgtcagatctaggggctttttgggtaagtctttagggttttctaggtatatgattatatcatcggcgaacagcaagtttgacttcctcttaatcaatttggatgcctttttttctttctcttgtctggttgctgtggctaggactagtcactactttaaaatgccaataattcagcaagggccataagttgtaaataggaacgggtaagtcagtgtatagtgaagaccactagagagattcaggtgatgtgccttgggaattcatgtggacgtggcattgattagattctggtcatcattgtaactaagctcatggaatctatatggaagttagtgaatatattctgtaagcttttactgtctaattttttcttcaagtgatgttagataaaaagtgaaactaggccaggcgtggtagctcatgcctgtaatcccaacactttgggaggcctaggagggaggatctcttgagcccaggagtttgagaccagcctaggtaacatagtaagaccctgtctctaaaaaaatttttttaaattagccaggcatggtggtgcacacctttagtcccagccactcaggaggctgaggcagtaggattacttgaacccagaagcctgagtttgcagtgagctatgatcacaccactgtactccagcctgggtgacagagcaagaccccctgccccttaaaaaaaaaaaaaaaaaagagagagagtttagcagtagactggatgacactgtggctaagtggccaaaataaacccaccttttaatatacaaatttgtgtgtgagtgtatgtgtgtgtgtacacatgtattttttaagttaatgtatgaacagtgttaaaatgattatgaaatatattcaaaaaagaaaatcaagatagcaactaaaagaaaagtaatggtaacatatgatcatgttgtaatgtaacagaataaataaactaccagactttctcaatgtattgatgtcctatagcctgtgcctcaatgcttgtctgtctttttaacgatccaatgatattgtacattctgttttctcatcttaattttccgttgacagtatatctgaaatttttaaattttattaaatacgtttccctacttagcatctgatagcttcttggtattctattacatgtatattttgtatttagcaaggcagtttgtgctcaacacagaaccaggcctaaacatttcctcctgtgatgtgttctctctcatgttttgaccaatttcaactgattctgatgccatagaagaggttctagtttgaggccaggcgcggtagcacatgcctgtaatctgactagtttgggaggccaaggcgggtgaatcacctgaggccaggagttcaagaccagccccgccaacatagtgaaaccccgtctctactaaaaatacaaaaaaaattagctaggtgtggtggtacgcacctgtagtcccagctacttgggtggctgagacaggagaatcgcttgaacctgggtggcagaggttgcagcgagccaagatctcaccactgcactccagcctgggcaacagagcgagtctccatctcagaaaaaaaaaaaaaaaaaaaaaaaaaaagaagcttctagtttgaacgataagtcctctctcagccttggaaggtgggaatgaaggcaagtgaatcttctcatggagaaactgagcagcctaatctcaagtctagatcagccttcccaaattggagccttgtccagaaaacctcttgctatcttgtctggatctggctttagtgagccattgacttactctaaaactacctttgtatagctgggtttcctggggtgtgagggagtgcttagattcattgtctgtttttccctaagttatatgttcagttgtgagggattaatttggaaggagaaatagaggagcagaaagattttattaaattaagtcatattgggaacactaacatctcttttcttctctcagctctggattctctggagtttgaatgtttccagtattggaaccccaccaagtaggactgatcaggtcttacaattctaaaaccatgacctgtgtaagttgattaattctgtttccttgcaatatcatgatcataggttatgtggatgttttcattaacctaaggcttcctatttaagaaggcctccttcagttatctgtccccactttcttctaatattgtgaatagtgatagcaaataactcagttttctccctatgagtattttctgtccacttttatatttattgtcaaatgtatttagtactcatgtgcttattgttcaaccaaagtctatgatagagcagtaaaggagtgaagtctcaacagggaactatttgagcttcctttataggtccttagtttggtgaattagagatgttggtcctatttggataccataggtaggctctgacattctccgcagacctgagttttctaggcaaataagatgggatttggttatcaattggtctgtcttagtatgtgatgagatctcatattctttgagaattttagaattgttggagatataccatggatcttgtcaaagaattactgagagacaagtttttattttgtggttgaatgtgttctgctgaacttgggtgacatttttttattatgagtcatcctatatcagtatccattctggaacaagaaaagtattaagtgatggaaaatggcgatgaatgagaatattatcctaaggagtaaatatgttgatttccagaactggggaagacctttgaagttctgtccaacaaagtatatgaaggtaggctagctacggtggctcatacctgtaatcccagcactgtgggaggccaaggcgggaggatcacttgaggccaggagtttgagaccccttgcaaaaaaagtgagacacccatctctacaaaaaaagtacaaaaatcatctgggcatggtgacttgcccctgtagtcccagttactcgggaggctatggcaggaggattgcttgagcgtgggaggtcaaggctgcagtgagcagtgattgtgtcactgcactccagcctgggcacagagtgagcctgtctcaaaaaaaaaaaaaagatttaaaaaatgtacacgaggtaaaagatggatcaacgacggagtaagtctgaaatattcattataaaattgttgcacagtcaataaaaaatatatttgtcaaaattaagaaaaatgcttatgtgctctgacataatgatgtaacttgagacttgtggaaatgtctaaatgttctggcaaaagcttttttttttaaatatggagattggccaggtgcagtggctcacgcctgtaatcccagcactttgggaggctgaggcaggcggattgcttgagcccaggagtttgaaaccagcctgggcaacatggtgaaaccctgtctctacaaaaaatacaaaaattagctgggcaggtcctgcacacctgtagtaccaactacttgaaaggctgagatgggaaaatcacctgggcctgggaggtcaaggatacaatgagccatgtttgagtcactgcactccagcctgggcaggagtgagaccccgtccccaaaaaaataaataaatagcacaaaacaattaaatattggagattattaaatttggcaaggacatctcatttttctaacttacaggaaaaatagtttagaaactcatgtttattgggaatttatgcatcacatgactagcagactatgtagttgtgtctttaatactttattgaattttattttatccattcctcagcaggtctgaattattgtggtaaccttcaacatgcagaaacatttgtctgtggcaataggatcctttaggaataggatcctttaggaataggatcctgtggcaataggatcctttaggaatatgtagacacgttgctttagtctgctaccagtcattagccacatatactatatcactccttttctctaatgtgctcttgtaatctcctatctttccttctttaaaatgtttttaaaattttgtaatgcatgggtttgcagtttcaggaattagtgacattcagggatgtggccatagacttctctcggcaggagtgggaatacctggaccctaatcagagggacttatacagggatgtgatgttggagaactatagaaacctggtatcactgggtaagtttatttgcctcaagtaatttaaaatgtgatctgtgatatgttacctttcaacacaatgaatttcaaggccatatttcaagacatagttgaatttctccttcctgttcttagaggaatatttcagctctgcctgtttgacaatggctgtgccactaagcaccatcattttcttcatcctttagagatagtcacatattctcctgccccttatgattgcctcctttccttaatatccaggggctgggttaaaattatatattattattattaaattatatattattagtccatgaataaccatgcccaggaatcctggtttcccattgtgcatatttccagaattcctatagatatgctgtgtcatcatctgatccacctgcagggacaaaagacgcagattcatgatttactctgagtataagaagaacccctgtgacatatagtgctggattagatgaacaatatttattggaaactgaagagtccacatttcatttcctgtagccaatttgtatgatttattgttgaaagttataattcatgagcttgcattgagtttgaatgaagattttatatatcagtcgggatgctttttttctctcatacagaaataataaaataattataattggtacagttgtgctcattatgtccccagccactctttggaagggagggggaatatatatatatatatatatatatatatatatatatatataaaataacttaatcctgaaagaactgtgtgatagtgttattgttattatcttatttatttatttatttttttcgagactggatcttgctctgttgcttaggctggagtgcaatcatagctcactgtagcctcaacctcctgggctcaagtgatcctcctgcctcagcctccttagtagttgggactgtagatgcaccaccatgcctaattttttttttttttttttttttttgtagagatgaggtctcgctctgttgcccgggttggtctcaaactcctggtctcaagtgatcctcccacctcggccttccaaaatgctgggattataggcgtgagccaccatgcctagccaatagtagtattattatgtccagtttatttgccaaattggaataatgagttgaagtcacatggccaaagtcacaaggttggtagatttaagaggaataatttgtgccccagccttctggctccagagaacttcacagctactttggggtggtaatatttggaaagagacattttataaggtcacaggttaaactttctcctaagagaccacgcgtgtatgagtttacattaaaataaggttttactgtgcctgtttcatttcttcaatcatctcacccctcttttatttgaagtccttagttcattgtaaatttaatcaaagctcaaaggtttctgttacttttgtttttatttttataccatgtggcatttcttttcttataaggaggacattccatttctaaaccagttgtggttgatttactggagcgaggaaaagagccctggatgattttgagggaagaaacacagtt

SEQ ID NO: 1769 - DNA, 32248 bp, Homo sapiens
ggggaagggattcttgttatgcaacagcagaaagcaacatggctgcacgtggttactgtgaaaagtacaaaataatacctacagaactgtgtaactggcccaggctcgtgctataatcccagcactttgggaggtcaaggtaggaggatcaagagtttgagaccagctcaggcaacatagggagacttcatctctaccaaaaaaaaaaaaaaaaaaaagaattagctagatgtagttgtgcatacacctgtagtcctagctactcctgaggctgagatgggcggatcacttgagcccgggagttcaaggttgtagtgagctatgatcacaccactgcactccaacttgggtggcaaagcaagattgtgtctttaagaaacaaaaacaaacaaacaacagcaacaaaaaaagtgggtaatttagcttaggaaactcccaagcagaatgttgaaggtgtcttgcttcttgttgcttaagtgctagaagtgagataagctagaaaaagactgttaaacagaagtgaaccaggacttgcttttggaaactcccagcctctccagaaagcaaatgatgctaaacttcagaaatagtctctggacaaagataaaatccagagtgctgttagggaaacatagtatgtaggtaaccttagggtatgtgttcattttgatcctctgaaaagcaaaaagcaagatcagatcagaaggaaggagggggctatgaatgaaaaagaggtccaggaaaggcagtgaaagccttcaggccatggtacaagatggatgactctgaaggagagggatgaagcaagattggtagaaaaactatgaaaacgcggggcagtatgaaaacagtttcagcctggctgattcacagttccccagctgaagggtctgggtttcgtaagaattgactagcatgaatacttatgttatgctcagaaaaggagctgggggcagcccataggaagcatggcctcaacattaacacaatgattatttcagagagggagcagagtgggcacttcacaggcaggttatctgttctccaaagaacagatagagtatgactgttaaaaacccttggttaagactccagcaatatctaatgtgacaattatgagaatcaccattcaatgaaacttctataaatggctctgtcagcagcctctgcagaagccctaggtagaggaggccggatttgcacgagagtgaatgaacaagtgagcatgagcaccagggaaaggtgatcctgaagattctgttcatctaggttcagctcacatgcaaagggaagggaattggacttcaggtttttttatttgctgtttgtgtttttgagacggagtctcatgctgttgcccaggctggagtgcagaggcacgatctcagctcactgcagcctccgcctcccaagttcaagcgattctcctgcctcagcctccctagtagctgggactacaggcgtgtgccatcacgcctggctaggcctcggtctcccaaagtgctgggattacaggcgtgagtcaccgtgcctggccagacttcaagtttgaagggtagagtttcaagaatttgaggacatatttttaaaacaccacgactggcattctgagtacaaattgcttatatttctacgtcatgcaaaatatgctcaagaagccacccaaattgcttgagcccagaagttgaaagctgcagtgagctatgagcatgcctctgcactccagcctgggtgatagagcaagaccctgtctcaaaaaacaaagacaaaaacaaaaacagacaaacaaacaaacaaaaaacggctccaaagtcacagctttctcctggcactctcactgtctaagccagcctgccagtgtgagcaagccacctggaaaacagatccttccgccccaaggagccttcagaagactgcaagctcatggaaagaccaattcaaaagcactcagttaagcctcttccgaatttctgaccctcagaacctatgagtgatgtttattgttgtggtaagacattaaggcttggggtaatttgtaatacagccattgaaatctagtatgaaaggcttttggtcatccttttaattaataagttttttttttttttcttttgagacggagtctcactctgttgcccaggctggagtgcagtggcgcgatctctgctcactgcaagctctgcctcccgggttcacgctattctcctgcctcagcctcccgagtagctgggattgcaggcgcctgccaccacgcccagctaattttttgtatttttagtagagacggggtttcatcgtgttagccaggatggtctctatctcctgacctcgtgatccgcccaccttggcctctcaaagtgctgggattacaggcaaaccaccgcgcccagccttaattattaagtttttttaaaaaaaaatccatgccatggatgttgtaggcatgaagaaactgggattcctgtttttttttttttttttcttaatttaccattgaatagtcagatattccattaaaacaggactgacattgaatgctttctaatgtggcaagatctgcattttgaactctctcaattgctaaagccatacctataagactaacattccatcatttctcaccagtgtgggctgtctgatgatgaatggcgcgctcgtactctttacggtcttacacttttatgctcctatgaattctctgatgggctttaagggctgaaccatatctgaaggttttcccacactgcttacacacatagggtttctcaccagtatgaattctctcatgttgaacaaggtttgaagcacgactgaaggccttcccacattctttacattcataaggttttccaccagtatgaattttctgatgttgggtaaggtagccatacattttaaaggcctttccacattctttacattcatagggttttttatcagcatgaatgctctgatgtgcagtaaggtgtgaactacgtctaaaggtcttcccacattccttacattcaaaaggtttctcatcagtatgaatactttgatgtagagtaagatttctatagaaagtaaaggtttttctacataccttacattcatagggtttcacaccagtatgaattttctgatgttgattaagatatccatgcaagctaaaggtcttgccacattccttacatttatagggtttctcaccagtatgagttttccgatgttgaataaggtttgagccagtactataggccttcccacattcctgacattcaaaaagtttcttaccagtgtgaatattctgatgtcgagtaagatttctatacaaagtaaaggtttttttacactccttacattcaaagtgtttcatgccagtatgaattttctgatgttgtttaaggtagccatacaagctaaaggcctttccgcattccttgcattcatagggtttctcgccagtatgagttttctgatgttgaaagagttttgaaccagtagtataggtcttcccacattgcttgcattcaaaaagtttctcaccagtatgaatattctgatgccgagtaagatttctatacaaagtaaaggttttcttacactccttacattcatagggttttccacctttatgaattctctgatgtagaagaaagtatgaggcagtggtatagcccttcccacattctttacactcatatggctttttaccagtgtgaactctctgatgtacagtaagctggtgacctcttctaaaggcctttccacatttctcacatatgtatggcttctcatcagtatgaaactgcccatgttcaacaagatttgagcgcctactaaaagtcttcccacattccttacatttatatggtttttcgccagtatgaactctctgatgaattctaagatgtccaccttgactaaaggccctcccacactcctgacattcatacggcttcccaccagtgtgaattctctcatgttgaacaatgtgtgaggcatatataaaggccttcccacactgcctacattcataggttttctcaccagtatgaaatctctgatgcacagtcagctgataaccacttctaaagttcttcccacattctgtacattcatagggtttctcaccagtatgaaatctttgatgtagagtaagttgatagccactacgaaagttcttcccacactctttgcattcatagggtctctcaatgacatgaaacctgtgatgtagaataagttgataaccactactaaatttcttctgacatttcttacattcatagagtttctctctcttatatatgctctgaagttgtgtagaggatatatctgtttcataagtgggtacttctatgtagctgattatctcacactgtaaatccaaatctgaaacaaaagaggacaacaaaaaaaatttgtatttctataccagagaacaagaaactttatgcaacaaagaaaaaccaacattcataataagtgaatggcatatagaattcaaaaatatggttacgaaatttgaaaaaggccaaaaagagttcagagacgtatgagagtttacgtaagatagtgaaattactgattgaggacataggtaacatttaggtggggccagaatctttgacaagcttgttccaaatctgctatattggcaccgtcaaagaccaagtgaattaaaactgagaggagagaaaccttgacatctttattttgaacctatcactgatttagatgcaggtcagtgtttaagaatacatcctttaagtttctcgagtgatttttcactgttcttaaaataaaatacaaatccctttccaaggactgctgcttacctaggaggtctcatgtcaaaacatcagctctttgcttcctattctctatcatagtccctcttttcaacacctggaatatagtacaattgccccttggtatctgtggaggatcagttccaggacctcctgcagataccaaaacccaacccagataccgacgccttaagtccctgatataaaatggcatagtatttgcacataacctataaacatcttcctgtatactttaaatcatctctggattacttacaatacccaatacaatgtaaatgctatgtgaatagctgttctactgttgcttcgaaaataatggcaagaaaaaagcctgtatgtggtcagtaccctcacaatttaaaaatatatgtttgatctgaagatggttgaatccatgagtgcagaacccatagatacaaagggccaactgtacaacttcccccaacacttaatgctttccacagaccgtttaactgctcaagagtccttggacttagacattttgtaggctgaatccttctcatcctttatgtttcagagtaaatgttctttctttagaaaggcagtacctgctaactctgtctgtctctctatctttatctgtctgtttatctatccatccatctagctatcaatcaatcatcaagacagagtcttgctctgtcactcaggctgaagtacaatagcccaatcatagttcactgcagccttgtactcttccagctcaagcgattttcccacctcagcctctcaagtaactgggactacagatgcacaacaccacacctggctaattttaaaattatgtgtagagacagggtctcactgtgttgcttatccaccgtgatcaagttggcttcatccctgggatgcaaggctggttcaacatacgcaaatcgataaacataatctatcacataaaccggaccaaagacaaaaaccacatgattatctcaatagatacagaaaaggcctttgataaaattcaacatcccttcatgtcaaaaactctcaataaactaggtattgatggaacatatctcaataatagctatttatgacaaacccacagctgatatcatattgaatgggcaaaagctggaagcattccctttgaaaaccagtacaagacaaggatgccctctctcaccactcttattcaacacagtactggaagttctggccagggcaatcaggcaagagaaagaaataaaagtattcaaacaggaagagaggaagtcaagttgtctctgtttgcagatgacatgattttatatttagaaaaccccatcatctcaggccaaaaactccttaaactgataagcaacttcagccaagtctcagggtacaaaatcaatgtgaaaaaatcacaagcattcctttacaccaacaatagacaagcagagagccaaatcatgaatgaactcccattcataatcgctacaaagagaatgaaatacgtaggaatacagctaacaagggatgtgaaggacctcttcaaggagaactataaaccactgctcaaggaaataagagaggacacaaataaatggaaaaagattccatcctaatggataggaagaatcaatatcatgaaaatggccatactacccaaagtaaattatagattcaatgctattcccatcaaattaccattgaaattcttcacagaattagaaaaaaactgttttaaattttatatggaatcaaagaagaccccgtacagccaagacaatcctaagcaaaaagaacaaagctggaggcatcatgctacctgacttcaaactatactacaaggctacagtaaccaaaacagcatggtactggtaccaaaacagacatataaaccaatggagcagaaaagagacctcagaaataacaccacacatctacaaccatctgatcttcaacaaacctgccacaaacaagcaatggggaaaggatctcctactcagtaaatggtgctgggaaaactgagtagccatatgcagaaaactaaaactagaccccttccttacaccttatgtaacaatcaactcaagatggattaaagacttaactgtaaaacccaaaaccataaaaaccctagaagaaaacctaggcaatgccattcaggacataggcatgggcaaagatttcatgacaaaaatgacaaaaaccattgcagcaaaagccaaaattgacaaatgggatctaattaaaccaaagaccttctgcacaggaaaagaaactatcatcagagtgaacaggcaacctacagaatgggagaaacctacccatctgacaaaggtctaacatccagaatttacaaggaacttaaacaaatttacaagtaaaaaccaaacaacacatcaaaaagtgggcaagggatatgaacagacacttctcaaaagaagacatttggctgcggtggctcatgcctgtaatcccagcactttgggaggccaaggcgggtggatcacgaggtcaggaattcaagaccagcctggccaacatggtgaaaccccatctctactaaaagcacaaaaaaaattagccaggcatggtggcaggtgcctgtaatcccagctactcgggaggctgaggcaggagaatcacttgaacgcgggaggtagaggttgcagtgagccgagatcaagccactgcactccagcctgggtgacagagtgagaatccatctcaaaaaaaaaaaaaaaaaagaagaagaagaagacatttatgaggccaacaaacatatgaagaaaagctcaacatcatcatcagagatcatcagagaaatgcaaatcaaaaccacaatgagataccatctcacaccagttagaatggcgattattaaaaagtcaggaaacaatagatgctggtgaggctgtggagaaataggaatacttttatactgttggtgggaatgtaaattagttcaaccactgtggaagacagtatggcaattcctcaaggatctagaaccagaaatacatttgacccagcaatcccactactgggtatatacccaaagaaatataaatcattctactagaaagacacatgtgcatgtacgtttactgcagcactatttacaatagcaaagacttggagccaacccaaatgcccatcaatgatagactggataaagaaaatgtggtacatatacaccatggaatactatgcagccataaaaagaaatgagatcttgtcctttgcagggacatgcatgaagctggaggccatcattctcagcaaactaacacaggaacagaaaaccaaataccacatgttctcactcataagtgggagttgaacaatgagaactcatggacacagagaagggaataacacaccagggcctgttgggggctgggaggtgaggggagggaacttagaggacaggtcaaaagatgcagcaaaccaccacggcacacgtatacctatgtaacaaacctgcatgttctgcacatgtatccatgtatcctgttttttttttagaagaaaggaaaaaaaaaagactactgatgtcacacagatacaccaaaaaggtatgaaagggtttataactctcatcatgaggctttctagagagcagagcagctcccaagcaggtcataaaacaacttgagagattaggaaaaggaggctggcttggagtttgcatggtggttagggtgtggtgctgggctgagtgttcctgctcatggcatggggttcacatggtttgaatgagaaggagggagcacctaggttttttaccagctggcccagaagtagacagaaggggaaaaaaaaagaggagtcatcagcagttaaacatcaaaaacagagtcagggactggagtggtggctcacgcctataatcccagcactttgggaagccgaagcaggaggatcactcaagcccaggagttcaagaccagcctgggcaacacaataagacctcttctttacaaaaaaaaattaaaaacttggctgggcatggtggcatgcacttgtggtcccagatattcgggagggcaaggtgggagaatttctagagcctaggcggccaaagctgcagtgagctgtgttcacgccactgcactccagcccaggcaacagagcaagaccctatctcaaaaaaaaaaaaaaaaaagaaaaaagaaaaagaaaacacttttttttttgagatggcatctcgctctgtctcctaggttggagtgcagtggtgcgatctcggctcactccaagctctgcctcccaggttcatgccattctcctgcctcagcctcccgagtagctgggactacaggcacccgccaccacgccccgctaatttttttgtatttttagtagagacagggtttcaccatgttagccaggatggtcttgatctcctgacctcgtgatgtgcccactttggcctcccaaagtgctgggattacaggcgtgagccaccgtgcccggccaggaaatacttaaagaaaaaaaatgctctgtcactcaggctggagtgcagtggtgtgatactggctcactgcaacctttgcctctcaggttcaagcaattcttgtgcctcagcttcccgagtagctggggccacaggcacccaccactatgcttggctaatttttttgtatttttggtagagatgaggtttcgccatgttggccaggctggtctcgaactcctggcgccaagtgatttgcttctgtctgcctcagcctcccaaagtgttaggattacagacgtgagccactgcattcagccaagactttaatttttttggggggtgggggtggtaggatggagtctggctctgttgcccaggctggagtgcagtgacacgatctcagctctgcaacctctgcctcccgggttcaacggattctactgcctcagcctctggagtagctgggattataggtgcttgccactacgcccagctaatttttgtatttttagtagagacagggtttcaccatgttggacaggcttatctgaaactcctgaactcaaatgatctgcccgcttcagcctcccaaagtgctgggattacaggcgtgagccaccacacttggcaagattgtaatgttttgaaagcagttttaaccatctctattttctaatgaactataatgtacatagaggatttcttaatgttataaatatttctttataagggttataaataattctgtatttctctattaacatggtatgaaataaagaaagcaaattatccaaagtctgattaaccaaagacaatccaaagtctgagtggaacatttaatcaataaagatccagaacttcatagatacaattcaaatactgcagagctcagttaccttccagtcacacacagattgttcctaaaaactgaccatatactgggctataaagcaagtttcatgtatttcaaaggatcaagattgtatagagtatgtagtctgaccacaagaaaaattttatgctagaaatcaatactgcaaagataactagacaacatatatttggtaattatatactgcttgtaggtaatcaatatactgaacaaacagtgcactgtgatatgataaaataacaaactttggaaaatgatgttttgactgaaaattataaggccatacactaaaggaagtatatacaaacactactcaagtgagtaaacttgatgctcatgggggtacaggttaacaactcagaaatgtgttacacatacactggagttgaatagatacagaaataaatggtggacggggagagccagttttcctgctgtcagggtaaaaagttacatataaacaagacaggaagattagaatacattttgtagtagtagatgagactcagagacattagtatgaactcatgtttagcttcatatgcatacaaatggatagacaaaaagacaattattaatatatgtaagcatacatcggcgaatgtgcatatatccattacccagaccttgttttttttttgggacggagtcttgctctgtcgcccaggctggagtgcagtggtgcgatcttggctcactgcaacctctgcctcccgagttcaagcgattatcctgcctcagcctcccaagtaactggcattatgtacagacccgcgcctccacgcccagctaatttttgtatttttagtagagacggggtttcaccatgttggccaggctggtcttaaaaactcctgacctcgtgatctgcccgccttggcctcccaaagtgctgggattacaggcgtgagccaccgtgcccagctgaccttggtttttaaatcccattctccactaaaaggaatcacactcctgggagaaacagctgattccaggaccacgggagggagaaaacaaaatgaacctgaaggtagtaccaggaaagaagtcctcaaaaaacagaaggatcagggtattaaatgaacataggaaccaagctaaaagagctatcaatgtctgaagttgaaacggtatgggtggcaaaagaagtaatgtaatatttgattctaccttgaagtataaaacaaatataaatgagtctacactgatatgagaagaaacaaatatgtcttatagaagaattctagatattaaactctatggaatgtaaagcttaatttccacttctatgtacctgctcccagggtgggctagacttaacaagttgtttctaaagagtagagaatggaaaaggaaaaaatagtacatttggagtgaagaaacctggcagacactactttagccaaatgataaaggttaatatcaccagtgatgtcatgtacccctgatgtaatgtgatgaaaagcatacttcacctctcttacagtctttctttttttttttgagatggagtctcactctgtggcccaagctggtcggctcactgcaaactctgcctcccagattcacgccattctcctgcctcagcctccaagtagctgggactacaggcgcctgacaccatgcccggctatttttttgtatttttagtagagacggggtttcaccgtgttatccaggatggtctcgatctcctgacctcgtgatccacctgcctcggcctcccaaagtgctgggattacaggcatgagccaccgcgcccggctgttacagtctttctaaaaactactacttccagcctaattacaaaaaaacaacagacttggattgggagaacactactggcatggtctgtcaagacagtcaaagtcatgaaaaacaaagaaaagcagaaaaaactgtcacagaacagaagagactggaagataagacaaatgtatacaatgtggtacccctaactggatgcatcttggaacagaaatatgagctatatggaaaaactggtgaaatcccaatggagagtctcatgtcagtttcctagttttgacaaacatactttatgtaagatgttaacaatggtggaaagtgggagagatgtatacaggaaatctctgtattatctttgtaaatctgtaaattttgtaaatctaaaattattctaaagttaaaaagttattttaaaaaaagttaattaccagtggtctttgtttggttggtggagaaaagaaaacaaacaaaaacgatcattacgtttttgcaatatcactacttctgcaatattcttggcaaaaaatgtttaatcttactctaatcatgaggggaaaccatcaaacctataaatctgacattccacaagaaaactggagtagacacttcaaaaaagccaaacccaaaggggaaaatgtagtaaggtaacaccaagataaaaagcctaagacctggctgggcatggtggctcatgccttaaccccagcactttgggaggccaaggcaggcggatcacaagttcaggaattcgagaccagcctggccaatatggtgaaaccccatctctactaaaaacacaaaaattagccaggcgtggtggcgggcgcctgtagtcccagctaactcagaggctgaggcaggagaatcgcttgaacccaggaggcagaggttgcagtgagccgagatagcaccactgcattccagcctgggcgacagagcaagacttggtctcaaaaaaaaaaaaaaaaaaaaaagcctaagacctaaatgcaatgtatgaatacacaatggatcctggaaacattttataaatgacatttttagaaacagcataacaaatgtaagtatagactctatagtagataagactacattactattataataatattgtgactttgaaggagaatgtctttattcttaggagatgtacatagttaagaggtgaaatttaatgacaactgctacttaccatcaagtgagccaagaagaaaggtgcatatatacagagaaaaagtaaggcaaaatgttaataaccaaagatgaatctatgtgaaaggtaattaactgtatatatattatatattatacattatacacatacacacacatacatatatacacaaatatatatttttaaaatattctcccttggcttgatgatttttaaaataaaaagctggggaaaggaaacagcaacccagaatttaaggagatattacctaaattcccatataaaattatttttaaccaaataatagtaggtttatatccatttatatttgatagcatgaaagaagaaaaaacaatttataaagcagatgtaaatacatatgagaaaaggagaaaacttgaaaattggtgacctatatattcatcacaagaagctggaaaatgcaacaaataaacaaaaataagatataaaagtccagtaattttaaaaaatggagttcacaaataccacagaagagccaaaacggcagatattttatttcaaactaatgttactgatgcaattctctcaacactgatgaagaaaaaagtaaatgctacaatatccaacctaggagtgctaccaggtacctcagctatagctctccacactgcacaaacacagtaagatggcattaggataaaaacatgttactaacttgcttgaaatgcataaaactctaaaaagtagccactgcaaaatcaacacacagaaaacttggacaattctataagcattatgtaatttgcataagtttttaaaaagcacaatggaaactgaagtttcagatttttttttctggagtgtttcttcagacattctaagagggggtaaaagggtacattccctcaacacatgtatgaagctaatgaaacacatccaacattatttttttttaattttttttttttttgagatggagtctccctttgttgcccaggctggggtgcagtggcacgatctcggctcaccacaacctccgcctcctgggttcaagcaattctcctgcctcaatctcctgagtagctgaggctacaggcctgcgccaccatgcctcactaatttttctacttttagtagagacagggtttcaccatgttagccagactgggtcacaaactcctgaccgcaagtgatctgccggcctaggcctcccaaagtgctgggattacaggcatgagccactgtgcccagccatccaacgttaggaaggataatgaaaaacaaaattgcaatccaatcccactcatgaaacctaaagaaaacattaaaagttcagatataattgataagagataaaatatcaacacatgatgaccaaattggagtccagcatgcaaggttagtcaagtactagaattcaacatagtacagaataatggaggaaaaaaatcgtatgaattttgttaatacatgcagaaagaatgattcctaagaaaaattttagcaattgtataaaaaagcaaacctcctccatgtgaaagagtatttatataaattgttaaaaaacataccttagccagacacggaggctcacacctgtaatcccagcactttgggactctgaggcaggagaattacagcagtgagccgagatcacactactgtactccaaccccagatgacagagcaagacccagtctcaaaaaaaaaaaaaaaaagtcaactgcctttttcttgtggaaaatgacaagctgaactaaaattcatatgtgaatatagaagactcagaatagccaaaacaatcttgaaagacaagaattcaagtatcagtactcatactttgtgacttcaaaactttttataatgctacagtaaatcaagcagtatatagtactgtatatagacagtatatatactgtctatagtagtatagtatggtatatatactgtgtatatatacagtatagacagcatatatactgtgtatatatacagtatagacagcatatatactgtgtatatatacagtatagacagcatatatactgtgtatatatacagtatagacagcatatatactgtgtatatatacagtatagacagcatatatactgtgtatatatacagtatagacagcatatatactgtgtatatatacagtatagacagcatatatactgtgtatatatacagtatagacagcatatatactgtgtatatatacagtatagacagcatatatactgtgtatatatacagtatagacagcatatatactgtgtatatatacagtatagacagcatatatactgtgtatatatacagtatagacagcatatatactgtgtatatatacagtatagacagcatatatactgtgtatatatacagtatagacagcatatatactgtgtatatatacagtatagacagcatatatactgtgtatatatacagtatagacagcatatatactgtgtatacagtatagacagcatatatactgtgtatatatacagtatagacagcatactgtgtatacagtatagacagcatatatactgtatatagtacatagtaccgtatatatactgtatatagtacatagtaccgtatatatactgtatatagtacatagtaccgtatatatactgtatatagtacatagtaccgtatatactgtatatagtacatagtaccgtatatatactgtatatagtacatagtaccgtatatatactgtatatagtacatagtaccgtatatatactgtatatagtacatagtaccgtatatatactgtatatagtacatagtaccgtatatatactgtatatagtacatagtaccgtatatatactgtatatagtacatagtatcgtatatatactgtatatagtacatagtaccgtatatatactgtatatagtacatagtaccgtatatatactgtatatagtacatagtaccgtatatatactgtatatagtatatagtacagtatatagacagaaagactatgtgtgtatatatatacacatacacttacatatatctcaaatttatgattaattcattatcaaaaagggtgccaacaaaattcaaaggagtctctttagcaatagtgctagcacaactggatattcacatgcaaaagaatgaagctgggcatctatctaccctttgtatcacatatgaaaattaactcaatgtggatcaaagacctaaatgtaagagctaaaactactaacttagaggataacatagaagtaaatcgtcatgaacttggattacaaaagtttcctagacaataatatcaaaagcacagcaacaaaagaaataataggatggaatagaatattattcagccataaaaaaagaatgagtattgatacctcctattatatggatgaaactcaaaaacattatgctaagtgaaagaaagtcattcgcaaaaggccacatgttgcttgattccttttttatatgcagaataagcaaatctatcgatatcaaaggagattaatggttgccagaggctgagagtgagaggatagggaatgactggcaatgtgtatgagctttcttttctctttttttcagagatgaggattttgctctgttccctaggctggagtacagtggcatgatcatggctcactgcagcctcaaccttcagggctcaagccatcctcccatctcagcctcttgagcagctgggacaacaggcacatgccaccgtgcctggctaatttttgtactttttgtagagacaggatcctactatgttgcccaagctggtctcaaacccctgggctcaagcaattctcctgtctcagcattccaaaatgctgggattacaagtatgagccatggcatttgaactgtataatttttgtaaacttttgtctaacattatttcaggctgggtgtggtaactcatgtctgtaatcctaacactttgggacactgaggtgggaggattgcttgagcccaggagttcaagatcagcttgtgccaaaaagcaagaccccgtctctacaaaaaaatttttaaaaaatcagccggggttggggcagggggtgtggcacacatctgtagtatatattttagttatatattagtgtacatctattcatgcaaaattgttatatttcacagtaaaattttattattattttaatttttgtgggtacaatgtaggtgtatatatttatggggtatatgagatattttgatacaggcatacaatgtgtaataatcacttcagggtaaatggaacatccatcacctcaagtatttatcctttgtgctacaaaaaatccaattatattcttttagttattttaaaatatacaattaaattattattgactatagtcactttgttgcgctatcaaatactagatcttatttatcacagtaaatttttttttaaagagaaaacagtagctataaaagacaggcagaagaagtatatttgtaaatggaaatatatggtattcaaaataaaaacagaaagaactggagattattaacattttaagatattactccagaaaagtttctggacattatcagcacatgaattatatattaaaaagccactatgtataccaaggaaaactaactagaatggtccatttaaagcacatactattagagttctatgacttcaaaaaacaaaaaaatttttatagttgccaggcaaaaagatcaagtcactttgaagggaggaaatatccagtgggcattagagttacacttagtgttacttaaactcagaaagtaaaggagcaataggtacgaagttctcaagaaaagtaagatgaattaagaatttgatatccaaagtatctttcaactacaaaaatagccaatagtttaaatatacaagaactctcacaatatatttctcctgatctcatcttggcaggctctttggtcattatcaacagccgggaaatggagaactgggaacatacagcgactacaatgtcagatacataaaagggagtaaaagataaaagtcatgttcctagaaaagttgggagaatgtctaaagaagtaattcatgtaaaaatgctgatttggggacaaacatccatgaatgttgtgtggtcaatttgtataatattccatggaaaagactgtcatttaaagctagcatatcaaataattgaaaagaatggccgggcacggtggctcacgcctgtaatcccagcactttgggaggccgaggtgggtggatcacgaggtcaggaatttaagaccagcctggccaagatggtaaaactctgtctctactaaaaatacaaaaattagccgggtgcagtggcaggtgcctataatcccagctactacggaggctgaggcaggagaatcgcttgaacccggggggcagaggttgcagtgagccaagatcatgtcactgcactccagcctgggtgataaagtgagactccacctcaaaaaaaaaaaaaaaaaagaaaccagaaagcataatacaaaaagaaccaaaaattgtcatacaataaatgtaaaaatgtgaaagtctctattaaatggcttttgcttgcattccagaaaaaaaatccatttctagatttcatttaaaaaaaaaaagactctaaaatagaatgatgagaaagggtacagaaggcaaagtttaaaaaaaggtatcttaatcttgatatcaaaaaattttgaattaagggaacaaattacaaaatagaccaaatggcactccataatattaaacaatgaaataacaatgaatttaaaagttaggaacagccacacaacataacacctactatcaaatcaattttcaaagaaaaagaattaaaagatttctaaaaataaaaagtaactaattagaggtaaagaataacagtctcaaattaatagaataaatctattttatttattttttttgagacagagtctcgctctgtctcccaggctggagtgcagtggctccatctcagctcactgcaagctccgcctcccgggttcacgccattctcctgcctcagcctcctgagtagctgggactacaggcccctgccaccacgcccggataatttttgtatttttagtagagacagggtttcactgtgttagccaggatggtctcgatctccttacctcgtgatccgcccgcctcggcctcccaaagtgctgggattacaggcgtgagccaccgcacctggcccaatggaataaatctaaataagcactgatgaaatctaattacaatgcttatctctgataataaactttatttcaagtggacaaagaatacttaaaacattgacctcagagcattcatggaaatctaaccacatagagcgccaacaatttgttgagttgacatttcaacaagttcttgaagaattaggaacacagactttaatctctaacaagaacatagtaccattggaaatttatagcagtatcagagagcaatttctattacatgaagtaaaataactctattttaattgaactgaagcaaggggccaaaataaactaaaattataactgtgtaaacattatataactagatagaacagcaaaatctgtgctcaaagcaaaatctatggccttaaatactgaagagatcaaaaaagaatgaaaataagtgagtaattatgactcacaaatttcaaaatcagaaagaaaataaattgatgcaacagaagaggcattggtaaaatcagagcaaaaatgatttactgtatttagaaaaatataaaacaactgcaaaatggttcttcgcaaaaaaaaaaaaaaagttaaatgaggcaatgcagtaagaataaaaggcaaatttcctaatacatgaaataaagaataacatgaggaaattaatcacttttataaaccttgtaagaaaagcccactacttgggctcaaccctgtgctctttcgcttaggttaacacgctaacctgtattatcccaccactgacccttcagggaagcctgcagggaaaacagatgtctggctgtctcctaatgactgatactgtgaaaaggctgttggctcctatctgcgaagtgggcacagagttgttatatctcagtaaactgatccttattttacctaggatcaatgtcggcctaccaacttcctttctcagaataagagatctttagatcacttaattcaaggagatttcgtgggcctgatgccacttaaagaactttactgttgaagggaaattctgccatctccttcttcccccaaacctcttcatgttatgctttatgagggctgaaaaatgttaagaattgtacatacggtttcagaaatagtagattaagatcatgggattaaagcacagaactcctcaacggaggtgcataaaattgcaggcatggtcactcaaaagagagctgctttagatgcaatgctggtctaagggggcaggcttatgtgctgtcttatgggaagaatgttatatcactagaggtctctgtggaatctttaatattactaatattaatgactcagaaaacagagtcgcaataacattaggaaacttgcagaatgctcccacttacctagttataatggctctttgcattcggtaaggaatctgttcttttgttttaatttggcctctgttggctcctgatttaggagactataaactgtgattgcaattcttccctaaatacgtttgttcaaaagtgtgatctccagaataataaaatgctactatatcattttatatatatacaatatataatctcatattatgataaaataataaaatgctactatacagtcatatatatagcaatgctactatatatgttccatcgaatgagccaacaaattatcttccaacaaaaggaatacaaaaatatgaaatgtatggagattagaataaccatgagggaaaacttttaaaaacacaatgataacctcaaacagcactgtacatctgaactagtgttcccacataagtttatcttccatctcaagcagaaggatgaccaaaaatggaaaaatgggggttactgaaaagtgaaaccaacacaatcccctcttaaggccaattgcttactcatcaaggctccaagtatctcacctctcactgcctacccacactaaaattattattgttgttattattattattattatttttgagacagagtctcactctgtcgcccaggctagagtacagtcgcatgatcttggctcactgcgacctccacctcctgggttcaagcaattctcctgcctcagcttcccgagtagctgagactacaggcgcccgccaccgcgcccggctaattttttgtatttttttgtagagacggggtttcaccgtgttagccatgatggtctcgatctcccgacctcgtgatctgcctgcctcagactcccaaagtgctgggattacaggcgtgagctaccgcgcccggcccacactaaaattatgatgtcatagactcagccccatcccaattagttcgctctgttttgcaaaacctgccttaaaaattacttttacactgttggtgggactgtaaactagttcaactactgtggaagacagtgtggcgattcctcagggatctaaaactagaaataccatttgacccagccatcccattactgggtatatacccaaaggaatataaatcatgctgctataaagacacatgcacatgtatgtttattgcggcactactcacaatagcaaagacttggaaccaacccaaatgtccaacaatgatagactggattaagaaaatgtggcacatatataccatggaatactatgcagtcataaaaaatgatgagttcatgtccgttgtagggacatggatgaagctggaaaccatcattctcagcaaactatcgcaaggacaaaaaaaccaaacactgcatattctcactcataggtgggaattaaacaatgagaacacttggacacaggaaggggaacatcacacaccacacaccggggcctgttgtggggtgggggtggggggagggatagcattaggagatatatctaatgtaaaggatgagttaatgggtgcagcacaccaacatggcacatgtatacatatgtaacaaacctccatgttgtgcacatgtaccctagaacttaaagtataataaaatatatatatatatatatatatatatatatatataaaattacccagttgctacttttctgtggagcacgttttttaaaaaaaaaaagaggctggacgcggtggctcacgcctgtaatcccagcactttgggaggcaggggtgggtggatcacctgaggtcaggtgttccagaccagcctggccaacatggtgaaaccccgtctctattaaaaatacaaaaattagccaggcttggtggcacacacctgtaatcccagctacttggaggctgtggcaggagaattgcttgaacctgggaggcggaggttgcagtgagctgagatcgggccactgcactccagcctgtgcgacagagcaagactccatctaaaaaaaaaaaaaaaggaaaaaaaaaattacccagtctggttctaaaacctgataagtaagtttcctggtttcttattttaagatactactgttactctttcaagaggttgttctcccttttttgcaataaatctaataagcttagctttgctagatgaacagaaatgtctggtaattcttggaagtcaacagtatatagacaccctaggaagtatatgaaaaatatcgttaaatatagaaaaataaatattttgaaatatcataaacatataacaagtaagtccaactcaaaataatacaaagtaccagaataatgaagatatatcaggaaggctgctattttcagacaaaaatcagttgctttctaatatatcaataataactaattataggctgatatatcaatatatctaatatatcaataataactaattataggctcacacctgtattttcagcactttgggaagccaatgcaggaggactgcttgagcccaggagttagagaccagctgagcaacccagtgagacccccatctctaataaacaaacaaacaaacaaaataacgaatcacacaatatagaagtatataattacatattatagaattatgtgttatacaagttcttaatctctgacaagaacatagcaccattagaaatttatagcaatatcagagaacaatttcttttacatcaagtaaaagaactctattttaattgacctgaagtttaactgtaactcaaaagtttataaacatttaataaaatacaaacatagatttagttttaagggtttttaaaaactatcatttttcaaatttctttttaaaaattatagtttagaccaggcgcggtggctcacgcctgtaatcccagaactttgggaggccgaggcaggtggatcacgaggtcaggagattgagaccatcctagctaatacagtgaaaccctgtttctactaaaaatacaaaaaaattagccaggcgtgatggtgggcacctgtagtcccagctactcgggaggctgaggcaggaaaatggcgtgaacccgggaggcggagcttgcagtgagccaagatcgcgccactgcactccagcctgggcaacacagcgagactctgtctcaaaaaataaataaataaataaataaataaaaatgaaaataaaaattatagtttaagttagagtgtagaacttacgttgttggtttctttaccctaatttaataatggcgtatcaaccttcactcgtctttgttcattttcactgcaactggataaatgattagatattactgccagtgtggcaattcctttagtatatgtaaaatttggacaagatgaaatggagaagattatttttctcagcttcagcaataagaaatgcaaacgataaagactgacattgttcacacacatgatttggagttttaagatttgtataaagcatgttctggtgttgcagcttcaaaagaacaggaaaatactccagagtgattggccacattgccacacatacgtacatagctgccagttcaatgagttaagagggcctagcacgaagagggtccacgagcaattagcatacctaagcctagatctggatttctaaatggcgttcccaataaaaggaactggtgctccttacagaagtggctgattccagggctatggcaaagaaaatataagataatcctagattaacaacttgtagtaccagaaaataagaaatgctcaccaaaggtgagcaggttgaaaaggcacagatgccaacttgaaagagttcccaatggccaaagcagaagacaaataactaaggatagtataggattataactcatggaataaaataaacatctatgagtccatattgatataaataattgaataaatagaggaaaaagggagtattccttcttacagaagaattccagctaatgggccaggtgcggtggctcaagcctgtaatcccagcactttgggaggccgcggcgggcagatcacaaggtcaggagttcgagaccagcctgaccaacatggtgaaaccccgtctctactaaaaatacaaaaattagccaggcatggtggtgcatgcctataattccagctactcaggaggctgaggcagaagaatcacttgaacctgggaggcggaggttgtagtgagctgagatcgcgccattgcactccagcctgggcaacagagtaagagtctgtctgaagaaaaaaaaaaaaatgtttccagctaataaatgtaggaggttaatgcaaaatcatcagtaggcaaatgttgcattaaagatgtgtacaagcaggccgggcgcagtggctcacgcctgtaatcccagcactttgggaggctgaggcaggtagatgacctgaggtcaggggctcaagaccagcctggtcaacatggtgaaaacccatctctacaaaaactacaaaaattagctgggggtggtggcacaagcctgtaatcccagctacagcgcctgtaatcccagcctgagcctgggaggcggaggtggcagtgagccaagacagcaccactgcacctgcactctagcctgggtgacaaagtgaggctctgtctcaaaaaggaaaaaaaaagaactggtataagcaaaatctactgttggaagctaaaatctgtggtggggatcagggggtgtaaaagttggaggagaaataggatatctgtattgttttcctgggactcacaaaataataccacaaaatgaagtccgcaaagcatcctcagaagcaaaagttttttctcggaccttctcttgccctcctgtctctcagtcccattctccccctaggctaaccataaagactagaagccctcttccccaaggcaagtcatggaaaccagaaccccttgtccccagagctactcataaaacctaaaaatattactctaactttcccctgcctttttgggtaaaaactggccataaaaaattccctggcctactttgtttgactgttggtcataagacccccattccagagagagtcccccattccggaaggaaggaatacgtgttctgagaggccaagaagaacctagacagacaggccttgctgggtttccctactcaggctattagcattagatcacaccctttttgcccaatcctgtttctacatagctgtccatactttgttaaacctaagcataaaaataggtaatttcccctgtacctttggatcttctttctaaaggctcctgtgtcatgaaaaagtatgattagatcaatttgtatgccttttcttctcaatctgccttttgtcagtgattttcagtgaaacttcagagggtgaaaaagaagtttttccttggcccggacagatacaattatgaaaagcatctcaaacaagttatatcatattagcattgcctaaggcacaaattcttatttcaccaaattataatattagcattgccagtggaacaaactattattgtctcctcatgtgatacaatgggaagaatagaacatcacctgggggcaatttttcaaaatatgttgggcttgaatttaatcataaggaagtgataatacattgcagattgtagacattctaaaaagaaatcaagtggactggactttgcaaagatgtcaatttcatgaaggaagatgctctgaattaaaggatattaaatagatttggtgagtaagtatgacagatgttccttcagttgatcctagattttaaaatttataaaaggacattactgggataattgggagaaatttggatgtggactgtatatttgataatattcttagagaattgtgaaatcacttgggtaatgtgggcaaagggttaacaaaacattttctaatgttctgtaattaaacattaaacagaatgggaatcccattctgcatgaggatgtactcttaggctaactctccaatgctgcttccctaaaaacagaatgtgtcaactatgttaataagtttcattatttatggtaacaatgaccctgattggcaagttgcacctcggactgtggactaggggctagatgaagagaacaccatatttagggtttctttgactacatttctttttaaaagagcatatccttgaaagaccctggaaacgatgactaaagaatcctcacaccagatattgtaccaacctttggagccagtctttttttttttttttgagaaggagtctcattctgtcaccaaggctggagtgcagtggtgcgatctcggctcactgcaacctccgactccctggttcaagtgattctcctgcctcagcctcctgagtagctgggattacaggcatgcaccaccacacccggctaattttttatgtttttggtagagacagggtttcaccatgttgaacaggctggtctcgaactcctgacctcaagcgatccacctgccttggcctcccaaagtgctgggattacaggcatgagccaccgcgcccagccaaaccagtcttcttaagtcaggggaggcccacactcctgccgtgtggatctcatttcctagcacttgagctctagcacctgtggaaaagagagctcctggaaggctgtctcatatgcatgaatcactgcagccatgccacagggtgctgagcaccaaatacccaagaacaactatagttatatatatatatattataaatatatacttaggttaagagtaaatatcagggccagttaccggggctcaagagtgtaatcccagcactttgggaggccgtggtgggcagatcacttgaggtcaggagttcgagaccaccctttgtattttgtaaaaatacaaaaattagccaggcatggtggcacacacttgtaatcccagctacttgggaggctgaggcaggaagatcgcttgaaaccagaaggcagaggttgcagtgagccaagatccatcactgtactccagcctgggcgacagagtgagactgtctcaaaaaaacaaaacaaaacaaaaaaaacagagtaaatatcagtcataagggagaaagcatatgatgcaatgactatatatttcataatatgattacagtgaaactaaaaattgggaggagactgggcatactaaaaaactgttttcagtaatcatttaggtagtaaagctgttactaatgttctaagaatgttttatgtgtcataaagaataaaggaaatgactgggcatggtggctcatgcctgtaatcccaacactttgggaggccaaggtgggcaggtcacctgagtttgggagttcaagacaagcctgaccaacatggagaaaccccatctctactaaaaatacaaaattagccgggcatggtaccgcatgcctgtaatctcagatactctggaggctgaggcaggagactcgcttgaacccaggaggcagaggttgcgatgagccaagatcgcaccttttcactccagccagggcgacaagagcgaaactctgcctcaaaaaaaaaaaaaaaaaatagaataaaggaaatgaatacttgcatggtattttaattttatcatcactggagtattggagaattggtactaaggaataagagatacagatcaaagacagaaaatttcaattaaacaccatttagttctaagtttggccaggaagttgccatataaactcattaggtaatttatttttatgtaaatatgtaaacacatacatatatgtatacttagagtttttttttgtttttttttttttgttgtttttttttcttaagacggagtgtcgctctgtcaccaggctggagtgcagtggcccgatctcggctcactgcaacctccatctcccggattcaagcaattctcctgtctcagcctccctagtagctgggactacagaccagtgccaccacgcccagctaatttttgtacttttaatagagacggggtttcaccatgttggccagaatggtctcgatctcttgacctcgtgatctgcccgccttggcctcccaaagtgctggcattacaggcatgagtcacttttttttttttttgagacggtgtctcgctctttcacccaggctggactgcagtggtgctatcttggctcactgcaagctccacctcccgggttcacaccattctcctgcctcagcctcccgagtagctgggactacaggtgcccgccaccacgcccgacaaactttttgtattttttgtagagacggggtttcactgtgttagccaggatggtctcgatctcctgacctcgtgatccgtctgccttggcctccgaaagtgctcagattacaggcatgagccactgtgcccggcctttttttttttttttttttgagacggagtttcactcttgtcgcctaggctggagtgcagtggcatgatctctgttcactgcaacctctgcctcctggattcaagtgattctcctgcatcagcctccccagtagctggaattacaggtagccgccacaatgcctggctaatttttgtatttttagtagagatggcgtttcaccatgttggccaggctggtcttgaactcctgacctcaggctggcctcccaaagtgctgggattacaggcgtgagccaccacacccagtcacttacagatttttctatctttaactggtaaaaagcctataacaatcttcaaccaagaaaaatgggcacttctagaggctagactgtggccttaaaataccatttcccactaaaagaacccaatagttcacaaacttatggctgactaaaggcttggtacaggaaacgtacaagataagcctgcaacactttgtcatatcagatgggagaaggctggcaataaaataaccgtctaaatctgggagtggtggctcatgactgtaatcccagcactttgggaggccaaggcaggcggatcacgggaggtcgggagttcgagaccagcctgaccaacatggagaaaccccatctctactaaaagcacaaaattagctgggtgtggtggcacgtgcctgtaatcccagctactcgggaggctgaagcaggagaatcgcttgaacctgggagacggaggttgcagtgagctgagattgtgccattgcactccagcctgggcaacaagagcaaaactccgtctcaaaaacaaaaacaaaaactgtctagttacctatgaaggatcctaggggccaggcacggtggctcatgtctgtaatcctaacattttgggaagccgagtccggtagatcatctgaggtcaggagtttgagaccagcctggccgacatggcaaaaccctcctctctactaaaaatataaaaattagccgagcatggtggtgcatgcctgtaatcccagctacttgggaggctgaggcaggagaatggcttgaacctgggaggtggaggttgcaatgagccaagatcacaccattgcatttcagcctgggcgacaagagcaaaactccatctcaaaaaaaaaagaaaatagaaaagaccaaatattgatcagcctttattttccaaatggtatcagtagttaccaaatagtaggtgatgtaaaaaattgtttatatttgtacataataaatgaaaaataaatgttagaattagaatatgaccattttggaatgtctgatgaattaatacatccaggcattgagcataaatgactgctaaaaatcacagagagacaaccagaaggtttatgctgagaacctaaaccattcactcccacactcagccttgaaacagagaagtggacctaccaatccccctacaggtagcttactctctccataaacacatcccactgttttcctcagcacaattttactgttctggaagtttcttgcaaaggcaaatggcttcattgttcattactggaagttcctgaaagatccatcaactcttaaatggcaaacatcaacagtttgtactctagaaaattttcaattcctaacctcaaaattctaacctagctgtttccactaattctccactgtggtgtcttcatctttacctaatcctaatcaagtccccgcatgaagaccagccttaaaccaaacttttaattctcagtaaaagccatccttgcccttctgcctctgagatactatataaagctcttcagaggtggtgttttcctttaacacagtaaaccataagcccagctctgtctggtatgaggggagcaggaaaagtgccaacatatgatgcatacaatactgcccaggaagttgtcttgcaataaaataaataaaataaactgaatcaaaatcgattaagtgtaacagtgaaataaatctagcatagctgactccatcttacttctaacctcacaagctaatggcgtttgctcataactgcacgctggccaagttaactatgggagtatttaatttatactataactttaaagcaaggataataatccctttccaaaactattaataattctcaaggagatagggagggtgtacatacaagtaacaacgttatgttaaagatttataggagcattgtgacctgaccgaggacaacgttgtgcaaccttctcggacccctgctgacacccagatatctgtagtcgccagtcacctcctgacctcaacctcctcctagttcccccttcgccaacataaaaaacggcatgagattcattccttttttttttttttgagacggagtctcgctctgtcacccaggctggagtgcagtggcgcgatctcggcaaactgcaagctccgcctctcgggttcacgctcttctcctgcctcagcctcctgagtagctgggactacaggcgcccgccaccacgcccacctaattttttgtattttttttttagtagagacggggtttcgccgttttagccaggatggtctcgatctgctgactttgtgatctgcccgcctcggcctcccaaagtgctgggattacaggcgtgagccaccatgcccggcagagattcatgccttttaagatggttctttaggacattagcctgccatcttctcgctttgctggctctctgaaataaagttccttgccctaacaccttacctcttgacttactggctgttgtgcagtgagcagtataagctctggactcagatacataagcctcttgacccctctacttatttagaggatatagaggggtcagagaacatatttaagcaaatctcagggatggcatcagcaaaaaatagaatggaagatgtttcttcagcaaataaggggttaagaacacaaagaaagatgaagacaaaacttagagacttgcgaaaacttaaaaagacttgaaattggagaaaaaataaaaggaaggaacttattaccattaaaatcagaatagtggttacacttagcaggaggaaggagattgtgactggttgcagacatgtggaggacttcagaatcaactagaaactctctccttgtttagaaatactgcttggagggtataaaataatcttgtatgtcattattataacctttctgtaactctaaaattatattaaaataaaaaaaaatttttaagttttaactcctgacacggctgtggtgacatgattgtttaacttgtaagactcagtaagctactcatgtgttatatgttgttctctgaatctgtctaatgtttttaaaaatgccttgaaaacaattacatcattggttctaatccttcttattcccaaaaattcaaattcaa

SEQ ID NO: 1770 - DNA, 271 bp, Homo sapiens
ctcgccctcgcggccacactttgaaagccctcccctaccggctctacactcaaacagcccgaggcttcgggcagcctcgagttcggattccacttctcagccttctggggtcactgaaaccctcagaactccgaggacaagtcggacacgccttcgcctcagccatcttcgccagcgcaataagtctctgtgtcttcacactcctggtagagggaaaactaaaacctccgggagccagcgtccggcggtgcctgcaatctaaccgggattt

SEQ ID NO: 1771 - DNA, 685 bp, Homo sapiens
tattgcatatgtgacattaacaagttagtttattagtactaatttttgagacttcaacaatgattgagtggtgtcaggtgtggcgatttaaaaataaaaatatgtctgcaaatgttttgacatttctctctttaaaaagtgaaagtgggctgggcacagtggttcacgcctataatctcagcactttgggaacactgtgggaagactgcttgagcttaggagtttgagacaagcctgggcaagttggtgagacccccatctctacaaaaaatttaaaaattagctgggcatggtgacgcacacctgtagtcccagctactcgggaagctgaagcaggaggatcactgaagcccaggaggttgaggctgaagttagccatatgcactccactggacgacagtgaaagatcctgccttcaaaaaaaaaaggtgaaacttaattcctctcttactgaatgtaggccagacttagtgattttctgggaacaaacagaacgtggcagaactaacttccaaagagagattataaaaaggatcacatctgtcacgtcacaagcacactcaagcagcttatggacaaggccccttgggagaagaaacgacttgccagtataaacttatcagccacagaactaagccatttgaaagcatatcctacagctatagtcaagcctttagataagcac

SEQ ID NO: 1772 - DNA, 271 bp, Homo sapiens
aaatcccggttagattgcaggcaccgccggacgctggctcccggaggttttagttttccctctaccaggagtgtgaagacacagagacttattgcgctggcgaagatggctgaggcgaaggcgtgtccgacttgtcctcggagttctgagggtttcagtgaccccagaaggctgagaagtggaatccgaactcgaggctgcccgaagcctcgggctgtttgagtgtagagccggtaggggagggctttcaaagtgtggccgcgagggcgag

SEQ ID NO: 1773 - DNA, 11221 bp, Homo sapiens
cccttcttcacagatgcccagactcaggcaaccatgatgttgtattcagaacctgtaggtttaatttcagaccctcaggatggtatctaaggccaatccatgagtcattacaacctccaaaaggcatttaggacaaatctgataatctttggtgtcattgccaataattaaagatggcaaccgatgggctaaatggtaacactcatatccttgcattcatagggtttctccccagtgtgaattctttcatgtctacttaggcgtgaggaaacagcaaatgctttcccacattctttacatacgaagggtttctctccggtatgagttcgcaggtgaacattaaggcgtgaggaatatagaaatgctttcccacatatcttgcatacaaagggcttttctccactatgagttttcaaatgtttactacgacgggaagaagtaatgaaggtcttcccacattcaacacattcataaggcttctctcctgtgtgaattcttgtatgctgaataagacttgtggatgtagtgaaggctttcccacattccttacactgatagggtttctttccactgtgacttcgtatgtgtatagaaaggcccgagtactgagcaaaggcttggccacattccttacattcatagggttttattccagtgtgagttcttacatgttcagtaagttgagttgatctagtgaaggctttcccacagtaagtacacttgtgtggttttattccagtgtgaatttgaatgtgatcattaaggcatgaggaatttctaaaggatcttccacattctttacattcaaaggacttctctcctttatgagttttcacaggtgcataaagttgagaaaaattagtgaaggatttcccacatttcttagtctttttggatttctttcctgtatgaactgctacacactgctttaggtgtgaagaagctgtgacagctctcccatattcctgaaattcacagagtttctcatcagtgtggattcccatatgattatcaaggcttgcaaaatacttaaagccttttccacattccttacatttgtagggttgtcttgcattgagaacttcaagatgtacagcaagacctggagttagagtaaagacttttccacatggattaaatttggaaagttcctgtccagtagaggcttccttgtgcacactgagggtgtcttttccataacaattaccctcagaagtattccctccattctgaactctcatgtgtgtcttaaggcaaaactgttccctgaagacctctccacaattcttacagtcacagagtttccatccactgtagcctcttgtctgttgatgacgagataaaggttttaaaacattttcagacatattaagagatttcacccatctgaacacagaagcattttgatgacaattatgattttactttttaatatttaatttttttttctttttgagagaaagtcttgttctatctccctgtctggagtgcatggcacactctcagctaacggcaacctccacctcccaggctcaactgattctcctgcctcagcctcccgagtagctaggaatacaggtgtgcaccactgcacctggctaatttttctgttttgtagaaacaaggttttgccaagttacccaggctggtctcaaactcctaagctcaggtgatctgcctgcctcggcctcccaaagtggtgatattacaggcatgacccaccacacccagtatgtttcacttttttcagagttggggttttgctccattgcctggactatagtgcactggtgtgatcatggctctctgtaacctcaaactcctggctgagttcaagtgatcatcctgccttagcttcctgtgtagctagaactatttgaatgcaccctcatgtctggccaatctttcagtttgtttgtttatttatttatttagagacagagtcttgctctgtagcccaggctggagtgcaatggcatgatttcggctcgttgcaaactctgcctcccaggttcaagtgattctcctgcctcagcctcctgagtagctgggattacaggcatgggtcaccatgcctggctaatttttgtagttttagtagagacagggtttcaccatgttggccaggctggttttgaacccctgacctcagatgatctgcctgccttggcctcccaaagtgctgagattacaggggtgagccaccatgccccacctcagtttatttatttttgagatgtagtctcactttggctggagtgcaagtggcgagatcttggctcactgcaacctccacctcctaggctcaagtgattctcatgcatcagcctcgcgaatagctgggattacaggcaggtgtagccacatccagctaattttgttattttttgtagagatggggtttccccatgttcgccaggctggtcttgaactgctgacctcatgatctgcctgcctcaacctcccaaattgctgggattacaggcgtgagccaccacacccagcctcaatttatttttatagagacaaagtcttactatgtagcctaggctgatctcaaactcttcacaaaaccccactgcctcagcctcccaaagtgctgggattacagccatgagctaccatgtcagcctactttgataattataatttttacaatttttcttccttgtttttattccctgacttcttgatttcttccagattgaatgatgggcccttttgccagaattctacgccactggctctaattgttcaaaaaaagaaaactgtagggtttttttattattatgcagggtggtttgagacaaggtctcactctgtcacccaggctgggtaccatggcataatcacagctcactgtggccttaatctcccaggctgaagccatcatcctgcctcagtcccccaaggagcttggattacaggtgcatgccaacacgccctgctaattttttattccttgtagagacagggtctctgttgaccaggctggtcttgaactcctaggctcaagtgattctcctgcctcagcttcccaaagtgctgggattacaggtgtcagccattgcacccagtcaaatagtgtagattttcatgaaactgtgtaaatcctcaatgtctagttacttatgtgggaatgtgtacttgtgggtattttgaggtgacaagttatacagatatggaatatcataaaattcatcacattcagactatctctccagagatcctgctccctcagtggtgcagaattcttctctaattctctcaagtatctctcatttgtgcagtttctttttcactgcaaactccacctcctgggtttaagcaattctgcctcagcctcccatgtatctgggattacaggtgcctgccaccacacctggctaactttgtatttttagtagagataagagtttcattacattggccaggctggtctcgaagtgctaatctcaagtgatccacgtgcctaggcctcccaaagggatgggattacagactcagtttcttttctttatttctgagacagagtctcactcggtcaaccaggctggaatgcagtggtgcaatctcagctcattgcaacctctgcctctgtgttcatgccattctcctgtctcagcctcccaagtaactggtatgacaggtgcccaccaccacactcggctaattttgtattcttagtagagatggagtttcaccatgtcggccagcctggtctcaaactcctgacctcaagtgatccacccatctcggcctcccaaaatgttgggattacaggtgtgagtcaccacattcaccttctttttaaaatcagagatgggatcttactatactgcctaggctggtcttgaactcttgggctcaaatgagacccccacttcagcctcccaaatagctgggattacagatgtaagccacacctctgactgagctgattttctagaatggaattctctatcttttctaagagaggaaattaagaaatatccctcatgaatcttaccatttgtatcccactgaatatttgattcttcaaaaaaccctgctgaagtgatgaccgtttggttctaggttgtatttcccattctaaagttaagcagaaaaagaaacgtaaggatttagagaagaaatattcatttaaaatgagtcatttttacttgttttcaaattaaacacagcaataaaataaaagccagagaaccttgaggattttggtacatcaaaaatttggctataatgatgtggggtttattacataactgatgtgtttagatagtttattacaaactacttctgtaaaaattaaaaatgccgggagtggtggctcacacctgtaatcccagcactttgggaggctgaggcgggtggatcacttgaggtcaggagttcgagaccagcctgaccaacatggagaaaccccatctctactaaaaatacaaaattagccaggcatggtggcgcatgcctataatcccagctacttgtgaggctgaggcagtattgcttgaacctgggaggcagaagttgcagtgagctgagatcatgccattgcactccagcctgggtgacagagcaagacttcagaaaagaaaagaaaattaaagctgatggaaaacagaaagagtagattttcgggaaaggaaagtaggaaagatctagataaacagcatgtatcagaatgataaagttaacaaagaaacagaacaggtagttttattagatcataggaatgtttgacaagatggaaaataagagtcaaagatatccaaaactctgagaaaaatagcttaaatcttctgaggcaaagtgcatctttaaaaatcttttttttttttttttgagatgaagtgtcactctgtcacccacactggagcgcagtggcacaatgttggctcaatgcaacctctgccttctgtgttgaagtgattctcctgcctcagcctcttgactagctgggactaaaggcgtgtgccaccacgtctggctaattttttgtatttttagtagagatggggtttcacagtgtaggacacactggtctcaaactcctggcctcagacaatccacccacctcagcctcccaaagtgctgggattacaggcatgagccaccacacctggccaggagatatatttctaatacaagcaatgtaattattacaaaagggatataaaagctaagatctccatttctgtgcccaaaaaagattggttatctctgacccattaaacccaaattcagacttatgtacacacctgtaaagcactaaaacttttatttcagtaagaaataaagtaggctgggtgtggtggctcatgcctgtaatcctaacactttgggaggtcgaggtgggtggatcatttgaggtcaggagtttaagaccagcctggccaacatagtgaaactccttctctactaaaaatacaaaaattagctaggcacagtgacacttggctgtaatcccagctactcaggaggctgaggcaggagaatcacctgaacctgggagggcagaggttgtagtaaacagagattgcaccaccgcactccagcctgggcgacagagcaagaccctgtcacaaaaataataaataaataaagtaagtaggctgggtgcagtggcttacaccataatcccagcactctgggaggccgaggtgggtggatcacccgaggtcaggagttcaagaccgggctggccaacatggcgaaaccccatctctactaaaaatacaaaaaaaaaaaaaaaaaaatttaactgggcatggtagcaggtgtgcctaataccagcaacttgggaagctgaagttgcagtgagctgaggtggcaccattacactctagcctgggtgatggagtgagactctgtctcaaaaaaaaaaagcagaaataaagttaagtactacaaaaagatgcttgctgtcatgggtaaacaactctgccactggatctcaaacatgatagtatattagattcaccttcagtgattctgaaaacacagatgactgggctccaaccctggagtttccaatttactacatcaaagaataggggaaggaagatgtatatttcttacagcacaaagctgatgctgttgatgaagtttccaggattaccacagtaaattaaaacatactacagcagggactgttactttgggactgtctctgttattccccactgttttcagaattgacaagcaagcatgtaacatacatctgccctataacaggctacaagaaatgatgctagtgtttatttttatttttaatgtatttttttttagacgaagtatcactgtgtcgccccggcaggagtgcagtggcgcaatctcagctcactgcaacttctgcctccttgttcaagcaattctcctgtctcagcctcccaagtagctgggattacaggtgcctgccaacaagtctggctaatttttgtatttttagtagagatggggattcactattttggccaggctggtctcaaattcctgaccgcatgtgatctgcccgcctcggcctcccaaagtgctgggattatagatgtaagccaccacaaccggcctagtcttcatttttaggatttttttttttgagatggagtctcaatctgtcacccaggctggagtgcagtggtgtgatcttggctcactgcaagatccgcctcccgggttcatgcaattctcctgcctcagcctcccgaatagctgggactacaggtacctgccactatgcccacctaatttttttgaatttttttagtagagacggggtttcacagtgttaggcaggatggtctccatctctggaccttgtgatccgtccacctcagcctcccaaagtgctgggattacaggcatgagccactgcgcccggcctagaattttttttttaagagacaaggtatcacaatgttgcccatgctagtatcaaactcccaggctccagcgattctcccacctcagcctcccaagtatctgggactacaggtgcaggccaccatgccaagcatagtgatgttactcttacccacagaggccaggttcatgtagttctccagcatcacatctctgtagaggtatttctcagttgtgtccagtaaagcccactcctctggggtgaagtccacagccacatcatcaaacgtcactgaatcctatgtcatcatacacatgctggtttgagccaatgaacacttccaccaatattcactggagaatgatgaaggggaaccttatactcacttacacgtggttgtcaggtctcccatgatctactccagggtttaatgtctcaggagctcttgtgtctaaacactcaaggttgacctcctacaggcatatgccttaaacagcactttttaaaatttttttaaatctttttttgctgatctatttttaattttttaatatttgtatttttaaattttaaattttatttttattttgattagaacagtacttcctaaagatgaattttcctctatctatcatctatctaatctgtttatttatttatatataaaaacagggtccaactgtgtcacccaggcacaactgctgattactacagcttcgatctcctgggctgaagtggtcctctcacctctgtctcctgagtagctggaattacaggcatgagccactgcacactgcttacgcttgatctcagcacaaccaggctaggagctcttcctgtcccattggtgtctatgcagcacactcctcagcacactgcagatacctgataaatgctgataagtgaatgatttgataaaaggacactttcatctgctttatcatccgtcaccgcacccagcaatgtaagaaagatgcagttggcaccatgaaggtcaagcttaagtagtaattactgagctactggactgattttcaagttaacattttatgtataggagacttcattccctggggaaattcatctggggactcagtccttgagtaaggcttcatttgctctaagaaaactctgaagatgagtctgtctagaaagaaatctgtctacctattggatgaaagcatatcatttttaacaacagtacgttttctgcttacctgataaccacttgccaggtagtcctccaccatcctttctacctttgtcttttcttcaaaagggcagattggttccctggaaaaaaaccctagtggaaaagtaagaaggcatgagaagccagagctgcccatccttcccacattctcatgcctagaagtcattccatcctagcttgaaattccgatatgctcctacacactcgagaaaactacacacacaacacttccatgaaatgccatagtaagtcctgtgtcagctagacacaaaagcagacttgggccaaactgcctgttgggtaaagggtaatagtttcatttttcaaggaaacttacaccctgaaaaatgtgactctcgtccaggtgcggtgcctcatgcctgtaatcccagcactttgggaggccgaggcgggtggatcatgaggtcaggagaacgagaccatcctagctaacacggtgaaaccccatctctactaaaaatacaaaaaattagccagatgtggtggtgggcatctatagtcccagctactcaggaggctgaggcaggagaatggtgtgaacccaggaggcggagcttgcagtgagccgagatcgtgccactgcactctagcctgggtgacagagcaagactccgtctcaaaaaaaaaaaaagtgactctctatctgcccatagtagtaacactcatgaagcttatgtagcatttcctaaggtacacaaaccagggctgaattctaaaacagcattctggctgggcacagtggctcatgcctgtaatcccaatactttgggaggccaaggcgggcaaatcacttgaggtcaggaatttgagaccagcctggccaacattatgaaaccccatctctactaaaaatagaaaaattatgggaggctgaggcagagaattacttgaacccaggagacagaagttgcagtgagtcgagaccacaggcactgcactccagcctgggagacagagtgagattctgtctcaaaaacaaaaacaaacaaacaaacaaaaattagccaggtctggcagtatgtgcttgtggtcccagatacttgggaggctgaggcaagagaatcacttgaacctgggaggtgaaggttgcagtgagctaagattgcaccactgcactccagcctgggtgacggaacaagattctgtctcaaaaataaataaataaataaataaataataaaacagcattctgttctgtggttcacttcaattcctcctaaaagaaccagctgcatgcctgctcaggctcagctcactggacgcttgtgttgtggagggtgacctaaagcagaatctctgaaaaagagcatcaacaaagacttaccacgggacaaataaatggctgccattctctgaagctgatggtgtgatgatgtgcatcccttccttgatgccaagatcacctcaggccagcttatgaatctaggtggatagaggcaatctccattcctctttgtacagggttatttgcggtcctgttcatatcaatcatcaaacaacaagcatgaaacatcagtcatcaaacattatgcctgagctttgtctctgcaggtgacagatgtgaaggccaccaaaaattgcccactcagtaccgtcactcagtaacaaaagtattaataacagtaactgacatttactgaggactgatatgtcagaagtagctctagtagctttatatatacatgctcagttaattatcatagccatccttcccagtagctatcattacctctatctatctatatctatctatatttatctatctatatctatctatctatatatctatctatatctatctatctatatctatcctatctatctatctatctatctatcgagacagggtctcactctgttgcccaggttgaaatccaatggcactaacacaactctctgtagcctagacttcccgggctcaagtgatcctcccacttcagcctcctgaatagctgggaccataggtgcgtatcatcactcattattattattattattttgagacagagtctcactctgttgcccaggctggaatgcagtggcatgatctcaactcattgcaacctctgcctcccaggtgcaagcgattatcaggcctcagcctcccgagtagctgggatttcaggtatgcactaccatgcctggctaatttttgcatttttagtagagacgcagtttcgccatattggccaggctggtcttgaactcctggccttaagtgattctcccacttcagccccccaactagctgggactacaggtgcacaccactgggtccggctaattttttgtagttttagtagagacaagttttcaccagattgcctaggctagtctcaaactcctgggctcaaacaatcctcctgacttggcctcccaaagtgctgggataataagcataagccacgatgcctggcccattacttctatttaatactgaaaaaaacctacactcaaacaaccctagtagtcggtctgatacttgtccctagagcctgatctcctgtatatggtgttacccccccgccatatgaccagaagacagtgcagacctgcacagaacaattcagtagtcaccagccacgtgtgttattgataacttcattacgtacctaagatgacttaagaacaaaatctaaaattttcaaaagtcggccgggtgcagtggctcacacctataatcccagcactttgggggaccgaggcagacagatcacctaaggtcaggagttcaagaccagcctggccaacatggcaaaaccatctctactaaagatagaaaaagtagccgggcgtggtggcacttgcctgtaatcccaggtactcggaaggctgaggcaggagaactgcttgaccctggaggcagaggttgcagaggttgcagtgagccgagagagcgcgcagcctctccgaactggacgcacagggaggactgatagtccctggagaagcgagtgaagtgaagcggatctgagaggctcctaggcgacagcgcgcaatcattcctttgccgccccctgctatccccgggaccgccaaggaggtggaactcaccacagcctgggcagactccaccaccataaaggcgaaaccgcactgacggagaggagccagcgccggaaaag

SEQ ID NO: 1774 - DNA, 12542 bp, Homo sapiens
tggccggtcgggctggaagggcggggatgagggatgggacgcatccccgggggatgctcctccaaagcttttatcgggcgagcgcagtggctcacgcctgtaattcctgcactttgggaggctaaggtaggtaaatagcttgagtctgctgggaatgggtgctcgcttggtgtcacaaaatcaacactgagacaaaggatctcagcaaggctagttttactttctgcagaatgggtgccactggctggcagtcttgccaccagagcacacattaacaaaggagacagggtttttttaaacttgaagtgtccatccttctgctgtgtccagcttccattggctggaacgggacctcaccttcctgtacttcactggattggctagcaacttagaacttcccaaaagaggcaatggcagaggagaacaaaggaagagaggaagtaacttgtggactgttgagagaggcaaaaacacttctaaatagggaaaggaataggccatgacctaatagttgcttggaccagttcaggcatgccagggcaaatatctaggctaaaatgtgggagctaaaaacagagtctattgatttctttattacggctggcagaatttaacaatattaccacaggtctttgagaaaatttggcttctaagagggattactatttatttcaatcagactgggaggaaagtccctttgaagaggaacctgtatttatttcattttctacaagtccaagagtttgagaccagcctgggcaaagtagcaagaccctgtctctctctctctctctctctctatatatatatatataaacatatatgtataaatacatataaatatataaatatataaaaaatatataaatatacatgttcaaaatgcttgttccctggtgccataaagaaattagcacttgaacataaatttaatttactcagcaaggccatttttacttcctgcagaaacggtatactcaccagcagttttgccacgagagtacaccaaacaaaggagatagggtcatttataacctgatgcttccaacctactgctgtgtccagtttccactggctggaatgggacctcacgttctggctagcaacttataactttttaaaagaggcaagggtagaggagaacaaaggaaggaggaagtaacttgtggaatgctgagaagggtcaaaacatcttcaaataaggaaaaagaacaggctatgccctaatgcttgcctggaccagtacaagcatgccagggcaaatatgtagactaaactgtgggagctaagaatataaagtacattgatttctttatcacggctcacagatacttgagaatgttagcacaggtctttgaataaattttgcttctaagagaagttactatttattcctaattaaatgtgaaggaacgtctttgaagaggaacctctgctttactttttagatataaatataaagcttgtttgtatgcctctcctcatgttcctagagcctttccatgattcttccatattgataaagctgccaatgaatggcatggtctatcccttccattcagtcagagtttctgtaggcctttttttcttcattctttattttttagaacctgctgattccattgggttttctttttctttcttgcttgcttgcttgcttgcgacagatctcactggatcagaccaggctggagtgcagtggtgtgatctcagctcaccgcaacctccacctcccaggttcaagcaattctcctgcctcagcctctggagtagctgggattacaggcgcctgccaccacgcccagctaatttttgtatttttagtagagaacgatttcaccaggttggccaggctgatctcgaactcctggcctaaaatatctgccaggccaagatggtaggatcgtttaaggccaggagtttaagacaagcctgggctacacagcaaaaccccatctctctatatatatataaaaaaaatttaaattaaaaaatgttttgttttgttttgtttttttgagacatagtttcgctctgccacccagactggagtgcagtggtgcgatcttcactcactgcaaactctgcctcctgggttcaagccattcttctgcctcagcctcctgagtagttgggactacaggcatgtgccactgcgcccaactaatttttgcatttttaatacagacatggtttcatcatattgacccagctggtctcaaagtcctgacctcgtgatccatccacctggtcctcccaaagagctgggattacaggcatgagccactgccccagccaaaaatatgtatttctgttgttatttttctgatcttaccacatgggccaggaacacatttcctacgttgtaaaatagcactgataccagacattctccccaagattattcagaaatgtaacatactcccaataaaaataccaaaagtttttttctggagttaagtacattgatactgaagtttatgtggaggaacaaacatctgataataaccaagaaaacaaaaacaaaagcaatgatgagcagcagatattaaaacatactattgacagttttcatgcaaggcaaagaattacattattttaaaataaaaataaagtccgggcacagtggctcacgcctgtaatcccagcaatttgggaggccgaggcaggcaaattacctgaagtcgggggtttgataccagcctggctaacatggtgaaaccctgtctctactagaagtacaaaaattagcaagcgtggtggcacatgcttgtaatcccagctacttgggaggctgaggcaggagagttgcttgagcctgggagatgaaggttgcagtgagccgagattgtgccactgaattgcagcctggctgacagagtgagactctgtctaaaaaattaattaattaattaatttaaaaaacatactataaagcctctataattaaaactatgtggtactagcacgtgaaacagaaactaataaaatatcaaaaaatagacccatgaacatgtagaaatttggttcataaatgtattttgccagatgcggtggctcatgcctgtatcctagcaatttgggagactgaggcaggaggatcacttgaggtcaggagttcaaaaccagcctgcccaacatggtgaaaccccatctctattaaaaatacaaaaacatagccgggttcggtggctcatgcctgtaatcccagaactttgggaagccgaggcagccggatcatgaggtcaggagttcgagactagtctgaccaacatggtgaaatcccatctctactaaaaatacaaaaattagctgggtgtggtgatgcatgcctgtaatctcagctactcaggaggctgaggcaggagaattgcttgaacccagaaggcggaggttgcagtaagctgagatcgcaccactgcactccagcctgggcaacagagtgagactctgtctcaaaaaagaaaaaaaatttagccaagcatggccgagcatgctggctcatgcctgtaatcccagcactttgggaggctgaggcaggcagatcacgacgtcacgagatcgagaccatcctggccaacttggtgaaaccccgtctctactaaaaatagaaaaattagctggcatggtggcgggtgcctgtaatcccagctactcaggaggccgaagtaggagaatcgcttgaacccaggaggcggaggttgcagtgagccaagatcgctcccctgcactccagcctggcgatagagcgagactccgtctaaaaaaaataaaaataaaaaattagccagcgttgtggtgggcgcctgtaagcccagctactcgggtggctgaggcaagagaattgctcaaacctgggaggcagaggttgcagtgagccgagatcacgccatttcactccagcctggcgacacagcgagactctgtctcaaaaaaaaaaaaaaaaaaaaaaaaaaagccgggtgcattggctgatgcctataattccagcacttttggaggcagaggcgggtggatcacctgaggtcacgagttagagaccatcctgaccaacatgaagaaaccccgtctctgctaaaaatacaaaattagctgggcatggtggcacatgcttataatcccaggtactcaggaagctgaggcaggagaaccgcttgaacccaggaggcggaggttggggtgagtggagatcgtgccattgcattccagccagggcaacaagagagaaacaccgtctaaaaaaaaaaagtggcatttcagataaatggggcaaaaaatgccatttgtaacaaatggaaggtctaagatagctggttagccatctgagaaaagatgaaattaaatccatacttcacagcatatacaagaataaactccaagtggactagggatctaagtgtaaaaaataaaaccacacacgtatttagggtgtttaagtgatttcttggctgagtaaggaaaaagatgttaccacaaggcggcagtagcacacaagcttcatttgggatgtgctttgacaggttagcagtgggggaggtagcaaacagcaagagaactatccacaggcttctacctgtgggtcgctgctcagaaagggtggaaaggaagaaagactctcagaggagaaggggaatcaaagagggggcttataaataactaaatgatgatattcaccagactggcagcatatcttccagttaaaaagctctgaaggataagtctggccaatatggtgaaactccgtctctactaaaaatacaaaaattagcaggtatggtgccaggtgcctataatcccagctacttgggaggctgaggcaggagaatcgcttgaacccaggagatggaggctgcagtgagctgagattgtgcccctgtactccagcctgggtggcagagcaagaccctgcatcagaaaaaaaaaaaaaaaaaagctctgaaggaccgcaggggtatggggttttcatagccctggagttatcttatctatggctgtcagatattggatataatttcagagaatacaaagcaggcgcactcgaaatggctaaaaataggcttgttcaggctatgtttcaaacaatccagtgtgttaaaattgcagtttggcaggggtaggctattgtgaatactagtgagacaaacattggtgtacaaatatctctgagtccctgctctgaacagttttggatatgccaaagtggaatatctggatcacatggtaattctgtttaatcgttctttttttttcttttttttgagacagggtctcactctattgtctaggctcgaatgcagtgacgtgatcatggatcactgcagtcctcaacttactgggctcaggtaatcctcccacctcaacctcccaggtagcagagattacaggtgcatgccaccaccatccttggctgaattaaaaaaaatttttttgtaaagaccatatttcaccatatgcccaggctggtcctgaagtcctaatctcaaggaatcccctggcctcagcctcccgaagtgctgggattacaggtgtgagccatcacatccagcatggttttgattttcattttcatgatgtttagtgatgttgagcatcgtttcatgagcatcttttcgtgtgtttattggccatctgtatatcttctttggtgatattattcaagtcctttttctgtattgaaatgagtttgttgttgttactcttgggttctagaaattttaaaaataaactctggatatttgtccccagtcagatacaggacttgcaaatattttctcccatttgtagattgtctttttactctcttgttattatgctttgatgcacaaaatttgtatcattgattaggttcaactcataatttttcttgtgttgcctgtgtggttgatgtcataactgagaagtcatttccagttgaagctttctcacctatgttttcttctaatagttttccagctctagctcttacactacactaaggtttttgatccatttttaaaaaatcatgccacattattattattattattattaagatggagtcttgctctgtcacccaggctggagtgcagtggcacaatctcagctcactgcaaactctgcctcccaggttcaagtgattctcctgcctcagcctcctgggtagctgggattacaggcgcctgccaccatggccagctaatttttgtatttttagtagagatggggtttcaccatattggctatgctggtctcgaactcctgaccttgtgatccacctgccttggcctcccaaagtgctgggattacaggtatgagccaccacgcccatccttcatccattttaagtaaatttttatatatggtataaggttagggtccaactccattcttatgtatgtctatatctcagttcctcccccatataatcctgtccccagggaatcaacaacccatgctcttcctagtcacctccttgaacatgtccctcccccaggaaacctccaacatgagatagaacaatgtagaaaggacattcaaaacttccctttcccttgtttgtcaaaggaatccgccccaacggttgtccccttaagggaagtcccactggggggagggggcattggttgcattaatgccctcttaaccagctcagaagtcagaaacttcaaaagggaactcaaaccattgttagatgacccttattgggtagcagatcaaattgatcaatttttagggccacagttgtatacttgggctgaactaatgtccattttagatattcttttctcaggggaggaaaggactgtgatccacagggccactgtgatagtcagggaacgtgaacatcctcctggccaaaacgttctgcagcggaccaaaaatttctgttccaagaccctcaatgggacaatcacaatgcagctcaccaagaaaatatgagggatctcggggaaatgataattaaaggaattcgggaaccagtaccctgaactcaaaatatttcccgagcattcaacatacaacaaagaaaggaagaagagctcatggaatttttaaacagactctaagagcaagttagaaaatacgcaggcttagaaataagaagatccacttcggcaaggattgttaaaactccactttgtcaccaacatttggccagaaattacaaaaaaattgtcaaaaaaatagagaattggaaagatagctccatagaagaacttctaaaggaggcccaaaaggtatatatgagaaaagacaaggaaagcagaaacaaaaagcaaaaattccactgcccacccttcaacaagggacacaaggaaataggtcccataaatgttctaagccactagctgcaaagtcacatacaggaaagaaaagggataaaacctggggacctaacggcaagaagggaaaagggggaaaataaatgtttcagatgtgggaaactgggacactttaagacagaatgtcccgaatgagaaagagagagaaatcctcccactcatgacttttgaagaagaatagggggttcagaggctctgtctcttttatctcaaatcccaccaatagcccttgataaatctacaggtgggacccaagctagaaattttcactttcctaatagattcaggagtagctcgctcctctgtttgctacctttcatcaaatgtagcctgctctgcagaggagctgttcgtcacggtggtaaagggggaaaggtttagaacaaaaattttggaggaaacagaagttaaattcaagaatagatcagccgccattaaattcatgttaatccctgatgcagggacaaattcgttaggaacgggacttaatgtttaaacttgggcgactaacggggcgcgggctttttttccccccctttttaaaaaaccccttttaaaaaacctttttcggccttctttaactacttttccccaacggtggcaaacacttactttacttccttaaacttgcttaccgcccctaaagaaagccataagtgcccatcccccttcgaactcgctcgttcgcgctctatattatcgtctcgggtcgggactgtggtccctgtgtggttccgtgatctattaacttttttccccccccaataaaacctctgttgtacatctgacttttccaacgttccgccaattcatataaacgaaaacctcctggggaaatagtaaaaagaaaacaacaccccattcccctagaaggcagaatgggtttaaaacctataatcaaaggtctcatccatgacagactccttgaaccctgtatgcctccttataacactctaatgttgcctgtaaaaaagtcacatggatcacggctagtgcaagatatctgggctattaaccaaatagtccagactactcaccctgtggtccccaacccttataccattatcagcaaaatcccatatgaccaccaatggttcatggtaatagacctaaaagatgccttttgggcttgccccttagcagaggacagccaggacatgtttgctttcaaatgggaggaccctcactccagttggaagcaacagtactgatggacagtcctgccccaagagtttgtggactccccaaatctatttggtcaaattctagaacaagtcctagagaattttcccctcccctcatccatatatccgctccaatatgtggatgacctgctaatttcaggaggcaccaagggctgggtaacagcagtatcaattaactttctaaattttctgagggaacgcggattgctggtctcaaggagtaaactcgtttgtggaacctgagataaaatacctaggatacttaataagcaaaggcaaacagagattaggccccatacgaactgaaggaatcatagccgtacctttgcctgaaacaaaataagggcttaggaaattctgggggttgactggatattgtcgcttatggattgactttatgctttaaaaacaaagcctctatgcctgaaacttactcaagagagacctgatcctcttctttggacaccacgggaggtccaacaagtagaggaattaaaacacctgctcataactgccttagttctaccttccctagaacagccattccacctcttcgtcaatgtgaataaagggatagctctaggggtgctcacccaaacacacgggggccaccggcagcctatagcctttctgtcaaaaattcttgacccactaacccacaggtggcccgagtgtatttaatctgttgcagcaactgccctatttacagaggaaagcaggaagataacctttgggggaaacctcactgtaaacacaacccatcaggttagaaccatcctaaaccaaaaagcaggcagatggcttaccgattcaagaatcttaaaatatgaagctatcttactagaaaaagatgatttaaccctaaccacagaaaaaacactcaaccctgccgctttcctaatgggaaatccaatccccaggaccctgaacataaatgtctggatctaatctgttatcaaactaaagtcaggcttgatctaagcgagaccccattcaaaacggggcaacacctgtttatagatggctcctcccaggtatttgaagagaaaagacacaatgggtactcggtagtcaatggggaagccctcacagaggtaaagtcaggaagactgcccaataactggtccacccaaacatgtgaattgttcacattaaatcaagccataactgggaaagggactatttacactgactccaaatatgccttcggggtagtccatacttttggaaagatctggactgaataaaaggccaggaccttgtccacaaggagttaatcactcaggtattggaaaatctccagctaccagaagagatagccatcctgcgtgtcccaggacaccagagaaatatttctttcaaaagccaaggaaataaacttgcagaccaaatagccaaacaagctgcctcttctcccaaaatgcccatttttcacctaaccccttgtctttcttccccaactgcaattcacatcttctctcccactgaaaaagagaaattaaggaaaataggagctaaagaaaactcagaagggaaatggatgttaccagaccaaagagaaatgctatcaaaacccctaatgagggaagtcctatctcaactgcatcaagggactcattggggacctcaagctgtgtgcgatgcagttctcagagtttatgggtgtataggagtttataccctagcaaaataagttacagatagttgcctaatatgtaagaaaactaatttaaaaaaaccctaaggaaaccaccttttgggggaaaaagcccaggattgagaccattccaaagtgtccaaattgactacaccaaaatgcccccaataggccacctaaagtacttgctagtaatagtggaccaccttactcactgggtggaggctattcccttttcaagtgcaactgctaataatgtgattaaggcattagtagaaaatattatacccaggtttggactgatagaaaacattgattcagacaatgggacccacttcactgcacatgtcattaagggactagcctaagtactaggaataaaatgggaatatcatactccttgcacccaccctcataaggaaaagtagaaaggatgaaccagactctaaaaagccacctaaccaaatcaattttagaaactcagttactatggactaagtgccttctcactgccttattaagtgtctgaactgcccctcagagagatgttggcctatctccctatgaaatcctatatgggttgccttatctacactctactactgacattcactgaaacaaagtttgtttcatttgaaacaaaggatcagttcctcaaaaattatatactcgatctgtcttccactttctcttccctcaggatgaaaggcttcctagcacaaacaccacccctggagttcccggtacatcaataccagcctggggatcacgttctcatcaagagttggaagagggaaagcttgaaccagcttaggaggacctcatctggtactcttgatgaatgaaacagcaatctgaatggctgaaaaaggatggacccagcactccaggtaaaaaggaccccacccttacagagtcatgggctgtcactccaagaccaatgccttccaagttagtattcaaaagggtctaatctgtctttcccttcttcccttaactactcaaggacacttcattatcaatgtaaccagatcactctctcctcaaacaatcacgtttgacgcatgtcttgccatacactttggggacctccaaaaccagaagcagctatcctccttgtagaaatatctctgtccttccagggtagattctaacctcttacattcacgcaactcttgcttggtagaagccgaaacccttacgttttgggaaaggttctgctccacctggaacaatgtcctatggactactaagcatcaagggtggacctccccaggaagctgcgcctctttaaaaccatatcttcgtttcaccaaaggaaatgccccctctaattgccaacatcatcaatgcaacccagtgcaaatttctatcttacccctacctccatcgatcttgagcccactttaggtcttttctatggcataggaaccgaagtgggctgagacagatcccatagggtcctttgaaatgcgctttagcaacccttccccacctcctaggggtaacccctctccaaaccctcctccaaatcaaacaactattttgccactacctaatgacaaaactaaagtggtcatagtggaagtcaaagacttaaaccctagccattgaaaccgggtatcaggatgcaaatgcctagctggaatggattaaatattccgttcatactctaaacaaaagtgactgttacgcttgtgcaacaggtaggccagaaacaaaaatagttccttttctgcttggatggtctaaccaaccgggtatggactgcatggtagctctttccagcatcccacagcctggggtaataagtcatgcggcactctcttactgcttttcccagaagtgaaagaccgccctgtgtgtcagcccccaagggccatccagctcccagcgtctgatgccaatttttcctcatgtctctcacaacagggagaaaacttggcattctttgggaatctaacaggatgcagtgaacccaagccttttgaagagctcaccaatcagactgcccttgtctatccatgagcagatgtttgatagtattgcggaggccctctagtgggtatgctgccaagcaactggagtggcacttgggctctaatccagttgtctatccctttcaccctggcatttcatcagccaaacaaaaaccaactaactcagaaaaaaaggaaagcccctcaagggtcctttgaccccgatatctacatagatgctatcggggtcccctgaggggtaccaaacgaattcaaagctcgaaatcaaatagctgctggattcaagtctgtccttttcttgtggtctactataaataaaaatgtagactggataaattacatatactataaccaacaa

SEQ ID NO: 1775 - DNA, 1504 bp, Homo sapiens
gtggccgcagggagcagacccggacagctccagagcctccgggccggggcggcggcggcgacgcttcggctcctcctgagccacctgctggacccgcaccccactccatccccacaggctggggacaggccctggcgcggctgtgtgggatcagaagcagagttgcagaatccaaggacctatttttgttctttctccgcactgctttatgggaggcattatggcccccaaagacataatgacaaatactcatgctaaatcaatcctcagttcaatgaactccgttgggaagagcaataccttctgtgatgtgacattgagtagagcagaaagactttcctgcccatgagattgtgctggctgcctgtagtgattacttctgtgccatgttcactagtgacctttatagaaggggaaaccctatgttgacatccaaggtttgactgcctctaccatggaaattttattggactttgtgtacacggaaacagtacatgtgacatggagaatgtacaggaactgcttcctgcagcctgtctgcttcagttgaaaggtgtgaaacaagcctgctgtgagttcttagaaagtcagttggacccttctaattgcctgggtattagggattttgctgaaacccacaattgtgttgacctgacacaagcagctgaggtttttagccagaagaattttcctgaagtggtacagcatgaagagttcattcttctgaggcaaggagaggtggaaaagctaatcaagtgcgatgaaattcaggtggattctgaagaaccagtctttgaggctgtcatcagttgggtgaagcatgccaagaaagagcagaaagactccttgcccagcctgctacagtatatgcagatgcccctgctaaccctcaggtatatcacagatgtaatagatgctgagcctttcatccactatggtttacaatgcagggatctggttgatgaagcaaagaagtttcatctgaggcctgaacttcagagtcagatgcagggacccaggacaagggctcgcctaggagccaatgaagtgcttttggtggctgggggcttcggaagccagcagtctcccatcgatgcagtagagaaatatgaccccaagactcaggagtggagctttttgccaagcatcacttgtaagagatgttatgtggcctcagtgtccctacatgaccagatctacgtcattggtggctgtgatggtcgttccagccttagttcagtggaatgtctagactacacagcagatgaggatggggtctggtattctgtggcccctatgaatgtctgatgaggtcttgctggagccaccaccctgggagatttgatctatgtctctggaggctttgatggaagcaggcgtcacaccagtatggagcggtatgatccaaacattgaccagaggagcatgctgggagatatgcagacagcccgggaaggtgccggactcgtagtggccagtggagtgatccactgtctaggaggat

SEQ ID NO: 1776 - DNA, 3341 bp, Homo sapiens
ggccgcagggagcagacccggacagctccagagcctccgggccggggcggcggcggcgacgcttcggctcctcctgagccacctgctggacccgcaccccactccatccccacaggctggggacaggccctggcgcggctgtgtgggatcagaagcagagttgcagaatccaaggacctatttttgttctttctccgcactgctttatgggaggcattatggcccccaaagacataatgacaaatactcatgctaaatcaatcctcagttcaatgaactccgttgggaagagcaataccttctgtgatgtgacattgagtagagcagaaagactttcctgcccatgagattgtgctggctgcctgtagtgattacttctgtgccatgttcactagtgacctttatagaaggggaaaccctatgttgacatccaaggtttgactgcctctaccatggaaattttattggactttgtgtacacggaaacagtacatgtgacatggagaatgtacaggaactgcttcctgcagcctgtctgcttcagttgaaaggtgtgaaacaagcctgctgtgagttcttagaaagtcagttggacccttctaattgcctgggtattagggattttgctgaaacccacaattgtgttgacctgacacaagcagctgaggtttttagccagaagaattttcctgaagtggtacagcatgaagagttcattcttctgaggcaaggagaggtggaaaagctaatcaagtgcgatgaaattcaggtggatcctgaagaaccagtctttgaggctgtcatcagttgggtgaagcatgccaagaaagagcagaaagactccttgcccagcctgctacagtatatgcagatgcccctgctaaccctcaggtatatcacagatgtaatagatgctgagcctttcatccactatggtttacaatgcagggatctggttgatgaagcaaagaagtttcatctgaggcctgaacttcagagtcagatgcagggacccaggacaagggctcgcctaggagccaatgaagtgcttttggtggctgggggcttcggaagccagcagtctcccatcgatgcagtagagaaatatgaccccaagactcaggagtggagctttttgccaagcatcacttgtaagagatgttatgtggcctcagtgtccctacatgaccagatctacgtcattggtggctgtgatggtcgttccagccttagttcagtggaatgtctagactacacagcagatgaggatggggtctggtattctgtggcccctatgaatgtctgatgaggtcttgctggagccaccaccctgggagatttgatctatgtctctggaggctttgatggaagcaggcgtcacaccagtatggagcggtatgatccaaacattgaccagaggagcatgctgggagatatgcagacagcccgggaaggtgccggactcgtagtggccagtggagtgatccactgtctaggaggatatgacggcttgaatatcttaaattcagttgagaaatatgaccctcatacaggacactggactaatgttacaccaatggccaccaagcgttctggtgcaggagtagccctgctgaatgaccgtatttatgtggtggggagatttgatggtacagcccacctttcttccgttgaagcatacaacattcgcactgattcccggacaactgccaccagtatgaccactccacgatgctatgtaggggccacagtgcttcgggggagactctatgcaattgcaggatatgaaggtaagtccctgctaagtagcattgaatgttacaaccctatcatcaacagctgggaagtcgtgacatccatgggaacccagcgctgtgatgctggtgtgtgtgttctccacaagaagtgaccattgttggagcaccatccagagctagtgaccagtccagtggacagttagtgggagaatcaagaatcctttctagaatgtctgtttctcactatgtgcacagggtgattacaggcaccagtgcagtgatgattgtacttatttgacacatactccccctcgtcctggttgttgttcctgagaagggtgggtaacagatactccagggaaaagaatgcacattgaatggatgtgagagaccacattacctctcccactactttggggagcactttcctgtcatttctaacttaccacgtgcttggtgtactatatgtatgttgtgcctcatatgttgcaaagaactaaggtgagtatagcctactagatgtgagcaatatccagcctagatgattggaaagataccaatttaagtaaacttggtaaaatccaagtcttttttttttccaggaacaaatacattttctaatctacaggtagctaggggcaacacagttccattctaaagggaaacaaaagggagagccccacaaaactttgggggcaagggagagatactcatctgacacttcttttggaggtcagggtttgtatatcagaattgaagttagaatcagtgaattaaactgaatttgatggaatgtgagtgaacctagaacagcactgaagtattacataacctggaagactgagaagggtatattctttgaatgatctttttatttccccaaggtctttcacactggagacagcataaaagagtgaaccaatgttgggatgagagaagatgacataaatgtgggagttcagtataactggggataaactagaagtacctgtgattttacagtcatcttattgcctgccaggggtcatctagccatggcagtgttaaccttgaatgggggtgaaagcctttctttgttgaatcaaatactactacactattacacttccacactatttatttggggatggactgggagtgacagtagcctagtagttcagctacctgattactgccccattcttttagaagcacacttctgccaaggagtggtttgtactgctgtgattggtacatttagtcttttttctgctataagttttccttacctgtcctttagtgtagattttattcattacaggacagaataatcaaggacaaccaaaatccttttgttagtttcagtacctcagctatcaacatttctgagctatcattcaatgttcctctgtgtcatggagtgaaattcttgttttatgggtattgggagtgtgggaatgtgataacctaaacaacctttgctctgaaattccatttttccctctttccctgaagtgtactgacctgtactacagagttaatttcttttgtatttttttaagaaaatattaaaaatcaatggtctcaaaaaaaaaagattttctt

SEQ ID NO: 1777 - DNA, 3341 bp, Homo sapiens; identical to SEQ ID NO: 1776

SEQ ID NO: 1778 - DNA, 8078 bp, Homo sapiens
aacagttaacaccttctgtaagatgctttatttcattgaccaacaacatggggtctgaaaacccagcgggaggggtctttttatcacagagccagtcccaggcgagctgatgcatctctgctcctctgcccctcaggagctctcatcctccaaccccagctgcccccacagccccaccccattcacagaaagagggctaccacgtgcctcagcccccctgcccaggctgccagctcccaggtccttttggagaaggactgatctaggcagggaggagagaaggccaacccctccagggctcactgaggaaggccaaagcctttcagaagcagttcctgcagtgacgtaatccacagcctgggatctgcatggccctgagatgcctgcggcaggctggccaaggggctggtgtgaagaaagagggcagggcccataagctgtggccaacaggggcaggggccctgcctggagtaaagtgctctggcctaggctgcgtgggtttcactgccctgcagccccagcctcccttccctctgatgccaggcacagggagcctagtcctcactggagttgtcaaactcctcccagtcagacacactcatcacctcagaggcaaagtccgggtcggcctggctgcggtcaggggtcccgcggggcggctcaaggagcagggagcggggcagggtgagcacacaggccgccaggcctgagatggagttgtccagctggggcccttcctcccagcagtccttctccacatcgtaaatgtgcacgtagcctgtgcggctgccgcggttgtgtgagcggccacctaacacatagatcctgttgtccagcacagcaatgccaggctcaccgtgcccagcagggagtgggcagacagatgaccactgtccagacgtgcagctgtagcaggccacctgcaaagccaaggctagaataaagcccagcacccactgggacgaggctgccagctcccccacaagcccactgaccaaggtggcaacagttacccaccattctgacaggtcaggccccctggaaggatggcacagggccagtgttgaaacatcctgtccatgggccaggctgctgctttctcacccagggatggccgagtctgcaggaggctgtcttttgggccctcccctagaatgatcctattctctctggctttgctccagcccagcccttcctctaggccacccggccctaagccagtctctgcccccgagtgtgtggctgtgcccccatcagcatgtggtcattccccatgtctgagggcactgcttctctcccctccaggaaacgaagctgcctgagagacatggactccactgaaatgtcttcaacctccttctgcagcactcaacacaggcagtaggacagggggaggagacagaaagtggaagtaattccttgcggagtagtcaacatcaatattctcttgtcttcaaaattgtccaaacagtaaacaaagacatggaaaaatgttcaacctactagtaattcaagaaacgcaaaatcaaaacatcagagacaaatttttcaactagcaaccactgcagagaaggaaaatcacaaaacccaatgctgttgagggtgtggtaaagccatactactatgtatctgtctgacatgccagaaaaggaatttggcaataagtattaagagccataaaaatcttaccttcttgactgattagccgtttttggttctctagctatggtgggcagaatagtggcccccaaagatgtctagttcctaatctccagaatatgctaccttaagcagccaaaggggctttgcagataggatcaagggtacaagaatacaaaaaaaaaaaggattaagggtgcagaccctgagatggggcagttttcctggattttccaggtgatccatccaattgcatgagcccttaaaagtggaaggggagaggccgggcgtggtggctcacgcctgtaatcccagcactttgggaggccaaggcgggctgatcacaaggtcaagagatcaagaccatcctggccaacatggtgaaacctcgtctctactaaaaatacaaaaatcagctgggcatggtggcacatgcctgtaaccccagctactcgggaggctgaggcaggagaatcacttgaacccaggaggcaaagggtgcagtgagccaagagcaccactgcactccagcctggcgacagagcgagactctgtctcaaacaaacaaacaaaaaaagtggaaggggaggccgggggtggtggctcacgcctgtaatcctagcactttgggaggctgaggtgcgtggatcacctgaggtcaggagtttgagaccagcctggccgacatggcaaaaccccgtctctactaaaaatagaaaaattagctaggtgtggtggcgaacacctgtagtcctcctagctactccggaggctgaagcaggagaatcgcttaaacccaggaggcagaggttgcagtgagctgagactgcaccagtgccccccagcctgggtgacaaagcaagactccatctcataaaaaaaaaaaaaagaaaaaaaggaagggtaaagccagacaagagagctgagaagtgaggaggactcaacctgccattgctggctttgaagacgaagtgtccccaagccaggaaaagtggggacctctagaagccaagaaggccctcaactgacagctagcaaggaaatgggactgcaactgccagggactgaattcttctaaccagagtgagcagggaggcagatccccactagggtctccacaaaggaaagatgccctgaccgcaccctggttttagcctggcaaggcccatgtcagaggacttatgaatgcagaataaatttatcttaagttgctatgtttgtggtgataggttactgaagcaatagaaaactaatgtgctggcccagaggatctcacaagcagaggacctgttaaaagccagatcgccaagacccaccctcagggcttccgaatcagtgggtctgaggtgcctcgtaacacagcgttcccaggtgatgcagactctgttagtctgagaatcacactttgagaactgttgcatgaacctaaggaaataatccaaaatacctgaaaagctcaacaaagcaactattacttgtcatgttatttggaatagttaaaacttagacacaagaggggatgatgaagattgagtgttaatctggaaaatgcccaggacaaaagtcactgagagaagcagaatgggatatgggatgctcttttttgtttgtttgtttgtttgtttgagacaaggtctcgctctgttgcccaggctggagtgcagtggcaccatcacggttcactgcagcctcaacctcctgggctcagttgattctccctcagcctcccaagtagctgggaccacaggtgcaagccaccatgcctggctaatttttttttgtatttttagtagagatggagtttcaccatgttgcccaggctggtatcagttcctggactcaagccatccacctgccttggcttcccaaaatgcagggattacgggtgtgagccactgtgcccagctcagaatgggatgctctttgactacaatcaggcagaaaacatacacggtcaatgctgaaaatggtcatactgaaaaacagtactgcaggggcctgattatgaatgcttttcctcacccttctctattttttttttttttttgagatggagtcttgctctgttgcccaggctggagtgcagtcgtgtgatctcagctcactgcaacctctgcctcccgggttccagcgattctcctgcctcagtcttcccaagtaactgggattacaggcgcccatcaccgcacctggctaatttttgtatttttagtagagatggagtttcaccatcttggccaagctggtcttgaactcctgacctcgtgatccacctgcctcaacctcccaaagtgctgggattacaggcgtgagccaccgcgcccggccacccatctctattttttaaagttccggcaatgtggttatattaactttataataaaagttttgttctgttgttttgttttattttgttttgaatagagacagggtctcattctgtcacctaggctggggaacagcggtgtgatcatagctcagtgaagcctccaactctgggctgaaacaatcctcccacttcagcctcctgagtagctgggactacaggtatgtgctgccagcctggatctaaaagttttgttgttgtttttttttgttttttttgagacaaggcctggctctgtcgcccaggctggagtgcagtggcgtgatctcagcttactgaaacctctgcctcctgggctcaagccatcccccaacctcagcctcccaagtagctgagagtacaggcatgcaaccacacctggctaatttttgtatttttgtagagatggggttttgccatgatgcccaggctggtctcaagctcctgagctcaagtgatcctctcgccttggcttcccaaactgcttggattacaggcatgtgccaccacatccggcctaaaagtttttaagagtaataagcaaaggtagatgtgtatgtgtgtgatactgtcatggtgacatttgtccaaacctatagaatgtgccaagagtgaacactgtggactctggttgatggtgatgcatcaatgcagtttcaacaactgtgacacatccacccctctggagcgagaggtctgcagtggggaggctatatgtgtatggggggaaaagggggtgtatggaaactgtaccttccacttaattttgctgtgaacctaaaactgctctaaaaaatagtctatttttaaaaggcacatgattcaattacattttccatcaataacaactgagaggcttgggaatgatgacgggtgtggactgccccgggccccactcacctggtgcacgtccctcctgtatccggcatcgttgttgctgcccccgatcacatacagcttgttgaggagggttgccatgccgtgccaggcgcgccgcacaggcccatcagccagtgtgtgccaagtgttgctgcctggatcgtagcagtgtgtctctttcaggtaatcctcccctctgcggccgcaggtgatatacatcttcccctccagcgtcgcgcctgcgtgggcatacacctgtgtggagccaccaggagaaatggcgtgagagggcagtgaggaagggtggctgggtactctgtcaaggccaatcaccaccccacacctgcctgacaacgctgtgaggcttcaccacttcccactcacatacagacaagaatcctccctcgattctcatgggacatactgtcctagtcattgacctctaacctcttcccaatagcggatacatctatagactcagaaatgaaatgtagcctttgtctttcctttgcccctaaagttaacatctgcatgggggaactccaagaaaataaaagcattttttccaagccagtctggaagaagccacagaaccctggggaccgctgacccaccctcagtggcctccacccctcccccactcccactggacatgcaatcctccgggcctgctgaccctgcttttaaaatgtttgtaaataatatctgacactaaactcatgatgtggggagaaaaatacacatggttcttgattctggtcctgaaccttctgtgggctttttaccctccctctgttgggctatctccatagggcccagcctgcccccatcatgggcacctcttaccctggccctaccacttccggaacccacccactcacacccagcaggccaacagaaggccccaaggcaaggccctgggtgttttgagggtagaggagcccctcagggtgtggaggctccagagctatgttactgggcaagtcactaacactgaggccatgcgggtggcaaaaacacaagagtctagagaggtggacggagcagtggggaggaagaacacacaccaagggtttggtttgggtcttctcctatcaccagtaggggtctggggaggtttttctttttttttttttttttgagacggagtctcgctctgtcaccaggccggagtgcagtggcacgatctcggctcactgcaatctccgcctcccgggttcgaatgattctcctgcctcagcttcccgagtagctgggattataggcgcccgccaccatacccagctaacttttgtatttttaatagagacagggtttcaccatgttggccaggatggtctcgatctcctgacctcgtgacccacctgcctcggccttccaaagtgctaggattataggcatgagccaccacgcccagccgaggtttttctttttaattaaacttttcattttgagataagtgtagtcacgtgtagttggaagtaaaaatacagaggtctcacgtgccttctttcccccatggtaggagcctgtgtcactatatcacagggtcaccaggatgctgacgtggacacagccacagaactgtcctatcaccaccaggatcccgaggggctgccctttagggtgacatccactcacctcccttaccctaatcccttccttaagccctggaaaccaccaatctcttctctatttctacagttttgtaacttcaagagtgttgtctgaattaaatcagtatacaaccttttgacattggctttctaccccaacccaggttctaccaggttgttgcatgtacaggttgagtacctccaaaatctgagactttttgagcacaaacacggcactcaaaggaaatgcatttcagacttttggataagaaatgctgaaccagtaactataatgcaaagattccaaaatctgaaaaaatctgaaatccaaaacacttctggtccccagcatttcagataaagggtactcaacatgtaccaatagttggttccttttctattgctcagtagtattccatgggtatctaccacagcttgtttaaccattcactgttgaaaacacctgatttgtttccagtttctggctattaccaataaagctactattaacattcatgtacagataagttattttttatttttttgagacagggtcttggtctattgcccatgctggaatatagtggcacaatcttggctcactgcaacctctgcctcccgggttcaagcaattcttgtgcctcagcctccggagtagctgggattacaggcacgcatcaccatgcctggctaacgtatacagagtagttttcatttctctgggataaatacccaggatggtaactgccagatctgttttccagagtggctgtaccatttcacattcctatcagcaatccatgagcatagtttccctgcacagtcaccagtatttcgtattttcactactttttattttagtcatcctgaggtagttctctcactgtggctttaatttgcatttccctgatagctaataatgttacatatctccttatatgcttatttgccatctatacatcctcttcagtgaaatgtttcttcaactcttttgccttctgttttttgttttgttttgttttgttttgtttgtttttttttgagacagagtcttgccgtgtcgcccaggctggagtgcagtggcacaatctcagctcactgcaccctctgcctcctgggttcacaccattctcctgcctcagcctcccaagtagctgggactatagacgtccgccaccacatccagctaattttttgtatttttagtagagatggggtttcaccgtgttagccaggatggtctcaatctcctgacctcgtgatccacccaccttggcctcccaaagtgctgggattacaggtgtgagccaccgtgcccggcttcttttgccctctttttaatggggttatttgcagtattttgccaaggttttttgtttttgagatggagtctcactctgtcgcccaggctggagtgcaaaggcacggtctcggctcactgcaacctctgcctcccaggttcaagcaattctcctgcctcagcctcccaagtagctgggattacaggcgtgtgccaccgcgcccaactaatttttgtagttttagtagagatggggttt

SEQ ID NO: 1779 - DNA, 8078 bp, Homo sapiens
aacagttaacaccttctgtaagatgctttatttcattgaccaacaacatggggtctgaaaacccagcgggaggggtctttttatcacagagccagtcccaggcgagctgatgcatctctgctcctctgcccctcaggagctctcatcctccaaccccagctgcccccacagccccaccccattcacagaaagagggctaccacgtgcctcagcccccctgcccaggctgccagctcccaggtccttttggagaaggactgatctaggcagggaggagagaaggccaacccctccagggctcactgaggaaggccaaagcctttcagaagcagttcctgcagtgacgtaatccacagcctgggatctgcatggccctgagatgcctgcggcaggctggccaaggggctggtgtgaagaaagagggcagggcccataagctgtggccaacaggggcaggggccctgcctggagtaaagtgctctggcctaggctgcgtgggtttcactgccctgcagccccagcctcccttccctctgatgccaggcacagggagcctagtcctcactggagttgtcaaactcctcccagtcagacacactcatcacctcagaggcaaagtccgggtcggcctggctgcggtcaggggtcccgcggggcggctcaaggagcagggagcggggcagggtgagcacacaggccgccaggcctgagatggagttgtccagctggggcccttcctcccagcagtccttctccacatcgtaaatgtgcacgtagcctgtgcggctgccgcggttgtgtgagcggccacctaacacatagatcctgttgtccagcacagcaatgccaggctcaccgtgcccagcagggagtgggcagacagatgaccactgtccagacgtgcagctgtagcaggccacctgcaaagccaaggctagaataaagcccagcacccactgggacgaggctgccagctcccccacaagcccactgaccaaggtggcaacagttacccaccattctgacaggtcaggccccctggaaggatggcacagggccagtgttgaaacatcctgtccatgggccaggctgctgctttctcacccagggatggccgagtctgcaggaggctgtcttttgggccctcccctagaatgatcctattctctctggctttgctccagcccagcccttcctctaggccacccggccctaagccagtctctgcccccgagtgtgtggctgtgcccccatcagcatgtggtcattccccatgtctgagggcactgcttctctcccctccaggaaacgaagctgcctgagagacatggactccactgaaatgtcttcaacctccttctgcagcactcaacacaggcagtaggacagggggaggagacagaaagtggaagtaattccttgcggagtagtcaacatcaatattctcttgtcttcaaaattgtccaaacagtaaacaaagacatggaaaaatgttcaacctactagtaattcaagaaacgcaaaatcaaaacatcagagacaaatttttcaactagcaaccactgcagagaaggaaaatcacaaaacccaatgctgttgagggtgtggtaaagccatactactatgtatctgtctgacatgccagaaaaggaatttggcaataagtattaagagccataaaaatcttaccttcttgactgattagccgtttttggttctctagctatggtgggcagaatagtggcccccaaagatgtctagttcctaatctccagaatatgctaccttaagcagccaaaggggctttgcagataggatcaagggtacaagaatacaaaaaaaaaaaggattaagggtgcagaccctgagatggggcagttttcctggattttccaggtgatccatccaattgcatgagcccttaaaagtggaaggggagaggccgggcgtggtggctcacgcctgtaatcccagcactttgggaggccaaggcgggctgatcacaaggtcaagagatcaagaccatcctggccaacatggtgaaacctcgtctctactaaaaatacaaaaatcagctgggcatggtggcacatgcctgtaaccccagctactcgggaggctgaggcaggagaatcacttgaacccaggaggcaaagggtgcagtgagccaagagcaccactgcactccagcctggcgacagagcgagactctgtctcaaacaaacaaacaaaaaaagtggaaggggaggccgggggtggtggctcacgcctgtaatcctagcactttgggaggctgaggtgcgtggatcacctgaggtcaggagtttgagaccagcctggccgacatggcaaaaccccgtctctactaaaaatagaaaaattagctaggtgtggtggcgaacacctgtagtcctcctagctactccggaggctgaagcaggagaatcgcttaaacccaggaggcagaggttgcagtgagctgagactgcaccagtgccccccagcctgggtgacaaagcaagactccatctcataaaaaaaaaaaaaagaaaaaaaggaagggtaaagccagacaagagagctgagaagtgaggaggactcaacctgccattgctggctttgaagacgaagtgtccccaagccaggaaaagtggggacctctagaagccaagaaggccctcaactgacagctagcaaggaaatgggactgcaactgccagggactgaattcttctaaccagagtgagcagggaggcagatccccactagggtctccacaaaggaaagatgccctgaccgcaccctggttttagcctggcaaggcccatgtcagaggacttatgaatgcagaataaatttatcttaagttgctatgtttgtggtgataggttactgaagcaatagaaaactaatgtgctggcccagaggatctcacaagcagaggacctgttaaaagccagatcgccaagacccaccctcagggcttccgaatcagtgggtctgaggtgcctcgtaacacagcgttcccaggtgatgcagactctgttagtctgagaatcacactttgagaactgttgcatgaacctaaggaaataatccaaaatacctgaaaagctcaacaaagcaactattacttgtcatgttatttggaatagttaaaacttagacacaagaggggatgatgaagattgagtgttaatctggaaaatgcccaggacaaaagtcactgagagaagcagaatgggatatgggatgctcttttttgtttgtttgtttgtttgtttgagacaaggtctcgctctgttgcccaggctggagtgcagtggcaccatcacggttcactgcagcctcaacctcctgggctcagttgattctccctcagcctcccaagtagctgggaccacaggtgcaagccaccatgcctggctaatttttttttgtatttttagtagagatggagtttcaccatgttgcccaggctggtatcagttcctggactcaagccatccacctgccttggcttcccaaaatgcagggattacgggtgtgagccactgtgcccagctcagaatgggatgctctttgactacaatcaggcagaaaacatacacggtcaatgctgaaaatggtcatactgaaaaacagtactgcaggggcctgattatgaatgcttttcctcacccttctctattttttttttttttttgagatggagtcttgctctgttgcccaggctggagtgcagtcgtgtgatctcagctcactgcaacctctgcctcccgggttccagcgattctcctgcctcagtcttcccaagtaactgggattacaggcgcccatcaccgcacctggctaatttttgtatttttagtagagatggagtttcaccatcttggccaagctggtcttgaactcctgacctcgtgatccacctgcctcaacctcccaaagtgctgggattacaggcgtgagccaccgcgcccggccacccatctctattttttaaagttccggcaatgtggttatattaactttataataaaagttttgttctgttgttttgttttattttgttttgaatagagacagggtctcattctgtcacctaggctggggaacagcggtgtgatcatagctcagtgaagcctccaactctgggctgaaacaatcctcccacttcagcctcctgagtagctgggactacaggtatgtgctgccagcctggatctaaaagttttgttgttgtttttttttgttttttttgagacaaggcctggctctgtcgcccaggctggagtgcagtggcgtgatctcagcttactgaaacctctgcctcctgggctcaagccatcccccaacctcagcctcccaagtagctgagagtacaggcatgcaaccacacctggctaatttttgtatttttgtagagatggggttttgccatgatgcccaggctggtctcaagctcctgagctcaagtgatcctctcgccttggcttcccaaactgcttggattacaggcatgtgccaccacatccggcctaaaagtttttaagagtaataagcaaaggtagatgtgtatgtgtgtgatactgtcatggtgacatttgtccaaacctatagaatgtgccaagagtgaacactgtggactctggttgatggtgatgcatcaatgcagtttcaacaactgtgacacatccacccctctggagcgagaggtctgcagtggggaggctatatgtgtatggggggaaaagggggtgtatggaaactgtaccttccacttaattttgctgtgaacctaaaactgctctaaaaaatagtctatttttaaaaggcacatgattcaattacattttccatcaataacaactgagaggcttgggaatgatgacgggtgtggactgccccgggccccactcacctggtgcacgtccctcctgtatccggcatcgttgttgctgcccccgatcacatacagcttgttgaggagggttgccatgccgtgccaggcgcgccgcacaggcccatcagccagtgtgtgccaagtgttgctgcctggatcgtagcagtgtgtctctttcaggtaatcctcccctctgcggccgcaggtgatatacatcttcccctccagcgtcgcgcctgcgtgggcatacacctgtgtggagccaccaggagaaatggcgtgagagggcagtgaggaagggtggctgggtactctgtcaaggccaatcaccaccccacacctgcctgacaacgctgtgaggcttcaccacttcccactcacatacagacaagaatcctccctcgattctcatgggacatactgtcctagtcattgacctctaacctcttcccaatagcggatacatctatagactcagaaatgaaatgtagcctttgtctttcctttgctcctaaagttaacatctgcatgggggaactccaagaaaataaaagcattttttccaagccagtctggaagaagccacagaaccctggggaccgctgacccaccctcagtggcctccacccctcccccactcccactggacatgcaatcctccgggcctgctgaccctgcttttaaaatgtttgtaaataatatctgacactaaactcatgatgtggggagaaaaatacacatggttcttgattctggtcctgaaccttctgtgggctttttaccctccctctgttgggctatctccatagggcccagcctgcccccatcatgggcacctcttaccctggccctaccacttccggaacccacccactcacacccagcaggccaacagaaggccccaaggcaaggccctgggtgttttgagggtagaggagcccctcagggtgtggaggctccagagctatgttactgggcaagtcactaacactgaggccatgcgggtggcaaaaacacaagagtctagagaggtggacggagcagtggggaggaagaacacacaccaagggtttggtttgggtcttctcctatcaccagtaggggtctggggaggtttttctttttttttttttttttgagacggagtctcgctctgtcaccaggccggagtgcagtggcacgatctcggctcactgcaatctccgcctcccgggttcgaatgattctcctgcctcagcttcccgagtagctgggattataggcgcccgccaccatacccagctaacttttgtatttttaatagagacagggtttcaccatgttggccaggatggtctcgatctcctgacctcgtgacccacctgcctcggccttccaaagtgctaggattataggcatgagccaccacgcccagccgaggtttttctttttaattaaacttttcattttgagataagtgtagtcacgtgtagttggaagtaaaaatacagaggtctcacgtgccttctttcccccatggtaggagcctgtgtcactatatcacagggtcaccaggatgctgacgtggacacagccacagaactgtcctatcaccaccaggatcccgaggggctgccctttagggtgacatccactcacctcccttaccctaatcccttccttaagccctggaaaccaccaatctcttctctatttctacagttttgtaacttcaagagtgttgtctgaattaaatcagtatacaaccttttgacattggctttctaccccaacccaggttctaccaggttgttgcatgtacaggttgagtacctccaaaatctgagactttttgagcacaaacacggcactcaaaggaaatgcatttcagacttttggataagaaatgctgaaccagtaactataatgcaaagattccaaaatctgaaaaaatctgaaatccaaaacacttctggtccccagcatttcagataaagggtactcaacatgtaccaatagttggttccttttctattgctcagtagtattccatgggtatctaccacagcttgtttaaccattcactgttgaaaacacctgatttgtttccagtttctggctattaccaataaagctactattaacattcatgtacagataagttattttttatttttttgagacagggtcttggtctattgcccatgctggaatatagtggcacaatcttggctcactgcaacctctgcctcccgggttcaagcaattcttgtgcctcagcctccggagtagctgggattacaggcacgcatcaccatgcctggctaacgtatacagagtagttttcatttctctgggataaatacccaggatggtaactgccagatctgttttccagagtggctgtaccatttcacattcctatcagcaatccatgagcatagtttccctgcacagtcaccagtatttcgtattttcactactttttattttagtcatcctgaggtagttctctcactgtggctttaatttgcatttccctgatagctaataatgttacatatctccttatatgcttatttgccatctatacatcctcttcagtgaaatgtttcttcaactcttttgccttctgttttttgttttgttttgttttgttttgtttgtttttttttgagacagagtcttgccgtgtcgcccaggctggagtgcagtggcacaatctcagctcactgcaccctctgcctcctgggttcacaccattctcctgcctcagcctcccaagtagctgggactatagacgtccgccaccacatccagctaattttttgtatttttagtagagatggggtttcaccgtgttagccaggatggtctcaatctcctgacctcgtgatccacccaccttggcctcccaaagtgctgggattacaggtgtgagccaccgtgcccggcttcttttgccctctttttaatggggttatttgcagtattttgccaaggttttttgtttttgagatggagtctcactctgtcgcccaggctggagtgcaaaggcacggtctcggctcactgcaacctctgcctcccaggttcaagcaattctcctgcctcagcctcccaagtagctgggattacaggcgtgtgccaccgcgcccaactaatttttgtagttttagtagagatggggttt

SEQ ID NO: 1780 - DNA, 411 bp, Homo sapiens
tttctagaagttttatggttttacatttaactccataaaccattttgaattcattttggtatatggtatgagacttgggttgatatccatttttttgccgacgcatgtctaattgctccagtactatttgctgaaagatatctttcctccactcaattgtttctgcacctttgtccaaaatcatgtgtaacatgactgggcatatttactcaggtctgtgggttttccattctgtttcactgatctatgtgtctatcactgtatccataccacagccttgattactgtagctatgtagtaatcttgaaattgggcagactcctcccatcttatcgttctttttcaaaattatttgagctattctagttcctttgcctttatatatacatttcagaataatctcatttacat

SEQ ID NO: 1781 - DNA, 411 bp, Homo sapiens; identical to SEQ ID NO: 1780

SEQ ID NO: 1782 - DNA, 797 bp, Homo sapiens
ggaacaattattttgaaaatctaagctaaatatccctcaatttttcattaatatttgagatatttgaagatagtgttcctaaaatgcctccacactcactataaacatctttaaccaaatcttcctttgtctcattcaccatgactcacctggaatcataccttttgacagttttttctccaccatccagggctctttcccatgctccaacaatgtgatcacatatggcttagttatggaaagacctgcttacaggaagaatatagaattgtttaagctgtggtcttctattatgagaggccatcaaaagagggaccacaggaatggatgaagggtgttcattgaaatggaaagataagctttaggcagggcacaacagagctgcacatttcctcgggagcatggtacagaattcagccgtttacttaggagaatctccagcaattcagggtggcaaaagaaaggtgtcccctgttggagtggaaggggtgatatccttacctacagagacaaggttctcataattctggaccatcacatccttgtataagtccctctgagcagaatctaggcatgcccactcttcatgagagaagtctatagccacatcactaaatgtcacctgaaatagcaaatatatttaggctcagccatagcccaggcctcttctgtcactgaagaagaggtaaaattagcctggttgtggaagaaatggaacaagattcaggagtcgtgacaaagattgggaatgtgatctcagttaagtaataataggacagttacgtagatggaattat

SEQ ID NO: 1783 - DNA, 8711 bp, Homo sapiens
cgcgatagcttcaggcctggcggcggcttccaagctaaggaacggtttggggcagtgtcgttcccggaggtcggccgccgttacccgctcaccagctacgcggcgcgtcaggtccgcggaggcgcgggctcggggcgcctgcgggacggtgaggccctgctgaggactccggcaagtgtgggtcgcggcgacggcggggctaaggccctgggtccgcgcgcggtttgaccacggccggggccttgggcatttcctggccttcctgttgagccgtgtaaacgcggggtgatgacggcgccgacctcttggcactgttgtgagagcgaagtgggcgcgagagcagacgccagctacagttttttttgggttatgtcgtcatgaagccggcgctttcagttgtgcaaccttgaacaaatgggttcagtatctcggaatttcagttttgtcttcattttaaaaaataaatctggtttagaactcgacctcaagcgatccgcccgcctccgccttccgaagtgctgggattaaaggcgtaagccaccgcaccagcctaacgaacatggcgaaacgccgtctctactaaaaatacaaaaaaaaattagctgggcgtggtggcacgtgtctataatcccagctattcgagaggttgaggtaggagaatcgcttcaacccgggaggcagaggttgcagtgagtcgaggtcgctccattgcactccagcctggagacagaacgagactccgtctcaaaaaaaaaaaaaaaaaaatctggaataatatgaatgcacaccttgcaaagtggtgaagactgaacgagctgataaagttgttaccgttgttttatgagtcttttgtatacagaataattgattttccccgcaggtggcacctggtaaatagcccttgcggagaaacaccctgttccttcccagggagagattgacgctccggcgagtgattaccagtgtgcttttccattaaggtgtgtgacaggtgccgcaagataagcccgatttttcatgactgctttttcctgcctttctgtgccctcaggacactgcccatctctaagataagaacctggaaaggggactctgttggccattggaaattgcagaataatgtctcaggtaagtcggtgtgtccccaaatcttcctgaaacactttattaggcctctgtgtgtttgctttgcttctcctgcctgttcccacctaatcaagtccatttaagggactagatctatggttcctttcactataggaagaatggagcccacaggagagctccaaggtattgtcctcatcacccagtgttcctcttttctacagttttctgctagaagactttctagattgccaacattttaaaactgtaattcacaatgcaactttggaatgtaaggttattcggtttatggttgtcaaaactgtaccatgtggtctcaagtgaagagatgtttggagtcatccttgattcttccttttgacttataactcatattcaggtcctctagtttggatctaaacgatacaccgtatacagcatctgaccattagttagcccatcaccaccaccaccactaccaccccagtccgagccacctggattattgcggtagcctcctagctggattcccagcatctgcccttaaccctcatcagtctgttctcagtacagctgtgaccatggtcctattgttatataaattcctgtcattccgcaacctaaaatttttcagtggttctaactgagtcacttctgcaatgacctatttgtacaattaggccattacctccctgatcccaccttccttctctgcctcctcattcctgtgcgctccagcctctgtcaccagttgctgtgccatccacgtggaatattcttcccccacatacgcacaagcttgcatccttatctccttctgtgtttgttccgtggttactttctcagaacagcttccctgaaagcctatttgcaattgcagtcaccttccctagcgcttccactcctccatcactgctttgttgttttccacagtgtgtgtcactcactagctgatgtactgtatgttcagtatatgcacgtgctcattgtctgttcctggtgggaggaatgctttttcttctttgttgactgttatagcgtcagtacccagagtgttacctggcaccaaatggatgcttagtaagtaattgtggagtgaataagatgagtaatgaagaactggtggggcagaatcatggcatggaaggtgaagcttgcacaggaggggatgtaagtagcagatgtacatcttgggtgaagtctgttttcatggaataattaagataattagaattgaaaaactggtgtggtagtgcatgcctgttgtcccagttactcgggaggctgatgaggtaggaagatttcttgagccctctggtgtaagcctgtagtgagctatgattatgtcactgcactccagcttggtgacagagcaagaacctgcctcttgaaagaaaaaacaaagtaaaggctaaagtgaactaatgccaaaaccattcattggttcatcttctaaacacttatgaagtacctgttaggaagagttgtacatggattttggtgtacactgacacacaggacttcatgatctagtgcagtattgtctaagagaactttctgcagtggtggaagtgctgtgcatgtgtactgatcagtacggtagccaacagccccatctgactattgagtacttgaactgtggcttaagcaatggagaaaataaattttaaattttatttaattattttatttttacattttaattaatttaaatgttgtagccaagttggctagtggctcctgtattgaagattgtggcactggtagaaaagtaagaaagcatgggaaatttaaataagtgctaggatagatatcctatgttcttttgggaactgagatgagtgaacatctcaagctgcccaggcaactgaaggggaagaaagaagcatccctggctctaagttgtaatgactggtttgtcaaagatatgagaaatgttatttttatttgggatataggcaattaacacagtggcaactccaattaacaggtgaatttagaagaaattttgtgtagcaaattgaactgtcaaatcttacttgaggataagttattgtttatttggaaaatgtgtgttggattgtatctgcttgcctatataaaaagatgagatttcttcctgtccttttcatctcaatagtggatcgcttgtgaagtgcatcaaggtctgatttagcttattcagtaataaaactgctttctttttttttctacatttgtggagaggattttctgccattggaaggcgattcgaattttaattattttctccaaacctgagaaaagtaaattctgcctttaaaaccaaagatccatgtcactggtgaacatgcatgcaaaatatccaaataaagtaatacaatactgaatgaactctcagagctaaaaaattaccacagtagagcagtctgttttacaaatcacagacagtaataactctgtattaaatggctgtactttttgcacatattataatttgactagccaataagctattattgaatatttaaacttctaaagttttactattttaaataatactgtgaaatgagtactattgagaagaatttctaagcacatctgtgagcatttccttagaatattttctttgaaatctactcttatttttttccccttccaggtcctatttaaggactgtctatggcaggagtcctcaacctttttgacaccagggatcagtttcgtggaagacaatttttccacggaagtgggaggtggtggaggtgatggtttggggatgaaaccgttctacctcagatcatcaggcattagattgacataaggagtgtgcaacttcgatcccttgcatgtgcagttcacagtagggattgcgctcctgtaagaatctatgctatagctgatctgacagcaggtggagctcgggtgataatgctctttcctgccactcacctcctgctgtgttgcccggttcctaaaggccacagaccagtaccagtccgtggcccaggtgttagacccctgatctatgacatgaaaccatccttcagtcttttcacccaggagtctcatattttaattattaaatgtttgtcagcacgaagtttaagtatacaccacaaatatatttttcttttttgtttatgaatcagttatgtgtatgttttagtccatttgtgctgctgtaacaaataccccagactgagtagtttataaataatgaaaattgacttctcatggttttggtgcctgggaagtccaagatcaagaggcaggcatctggcaagggccttcttgctgtgtccttttgtggtggatgggcaaagagacgagagagaggcaaaggggggccagaactcatttttttaaataaggaaccctcttccctgatgatgacattaatccattcatgagggcagagtcctcaaggcccaatagtctcctaaagatctaacctctcaatactattagaatggtgattaagttcaatacatgcttttttggggaacataatcaaaccatatgtctatcagtctttaatattaagatgtcttttttttctgaacccattttttgtgagatttagtgaatctttctgagtatcatatttgagagacaattgctttagccttatttttaattacttagctagcatgtaagctataaaagatataactaaatacttgactctgtgctgtcaaatgtcaaatgttgatttttaaaaattcatataattctaaacttttaacaaaattactgaagcaaagctctcatatttgtctctcattcttattgtataaaaattctaagcacataactgtcccctttattgtataattccaactacataactgtcctattattacttacctgacatcacattcccagtcattgtcacagctcctgaatcttgttccatttcttccacaagcaggctaattttaccccttcttcagtgacagaagaggcctgggctatggctgagcctaaatatatttgctatttcaggtgacatttagtgatgtggctatagacttctctcatgaagagtgggcatgcctagattctgctcagagggacttatacaaggatgtgatggtccagaattatgagaacctggtctctgtaggtaaggatatcaccccttccactccaataggggacacctttcttttgccaccctgaattgctggagattctcctaagtaaatggctgaatttctgtaccatgctcccgaggaaatgtgcagctctgttgtgccctgcctaaagcttatctttccatttcagtgaacacccttcatccattcctgtggtccctcttgtgatggcctctcataatagaggaccacagcttaaacaattctatatttttcctgtaagcaggtctttccgtaactaagccatatgtgatcatgttattggaggatggaaaagagccctggatgatggagaaaaaactgtcaaaaggtatgattccacatgagtcatggtgaacgagacaaaggaagattttgttaaagatgtttatagtgagtgtggaagcattttagggatactgtcttcaaagatctcagatagaaatgaaaaattgagggatatttagcttagattttcaaaacaattgttcctccctctcaaattattatctgtatcactcatgtcacctaatcaaggttagaggtttttgccatcataataattcaaattgttactatattcatgacaaagtaagacaatttattctttcttaattctacttaagaaaaatatactaatagttttaagctaagaaaagctgtcagttagatggaaaatcacttttctaaagctgagctttgtagatgaaatatgaacatattagaggaagtaagggacatataaatgtttctaggaataatattttctaatgttcaagaaaaatatgattcacacagtttcttcataacctcagaaagcctatatctttgtcagctataaagagcatttactttgtttttactgcagttgtttaatatagtagtatcaattctgtattttaagcttgataatccagcagcaaattgagattaatggaaggttggaaaaaaaggctatgaaacaaaatgcaacctttcccacatgaatataggcacaaaatgatgatttgtaatcctgaatgccttccacatcttatttctgatactttccttttttccatactattttatccatttcgtacagcttacccatttcctttatcacactctgttcctgcttctgtgaactttggattctctgctctatttgagcattgttcagaagtcactgaaatatttgagttgtcagaactatgtgttttctgggtgcttcatttcttatccaattctcctaattccactgtagaagcttttttcaagaagtaaaaaaaaaaaaaaaaaaaaaaaaaaaaaaaaaaaaaaaaaaaaaaaaaggcagtgctttgctttcttgatatatttcagattgggaatcaagatgggaaaacaaggaattatcaacaaagaaggatatttatgatgaagattcaccccaaccagtaacaatggaaaaagttgtaaaacaaagttatgaattttcaaattctaataagaatttggaatatacagaatgcgacacatttagaagcacctttcattcaaagtctactctttctgaaccacaaaacaattctgctgaagggaattcacacaaatatgatatattaaagaagaatttatcaaaaaagtcagttataaaaagtgagagaataaatggtggaaagaaacttttaaattctaataaaagtggggcagccttcaaccagagcaaatctcttacccttccccagacttgtaatagagagaaaatctatacatgcagtgaatgtgggaaagcctttggcaaacagtcaatcctcagtcgccactggagaattcatacaggagagaagccctatgaatgtcgtgaatgtgggaagacttttagccatggttcatcccttacacgacatcagataagccatagtggagagaaaccttacaaatgcattgaatgtgggaaggcctttagccatggctcatcacttactaaccatcagagcactcacacgggagagaaaccgtatgaatgtatgaactgtggaaagtcttttagtcgtgtgtcccttctcattcagcatctaagaattcatacgcaagaaaaacgctatgagtgtcgtatatgtggaaaggccttcattcatagttcgtctctcattcaccatcagaaaagccatactggagagaagccttatgaatgtagagaatgtgggaaagctttctgctgtagctcacaccttactcaacatcaaagaattcacagtatgaagaaaaaatatgaatgcaacaaatgtctcaaggtctttagtagcttctcatttcttgttcaacatcagagtattcatactgaagaaaaaccgtttgaagtttagaaatgcaggaaatccttcaaccagcttgaatcactgaatatgcatttgagaaatcacattagattgaaaccctacgaatgcagtatatgtgggaaagcctttagtcataggtcgtccctgcttcaacatcacagtattcatactggagagaaaccttacgaatgtattaaatgtgggaagaccttcagctgtagttcaaaccttactgtacatcagagaattcatactggagaaaagccatataaatgtagtgagtgtgggaaagcttttagcaaaggctcgaatcttactgcccatcaaagagtacataatggagagaaacccaatagtgtggtaagtgtggaaaagcctttagatcatatgaatccctatacatgtgagaaatcttacagaagagaagcagtgtttatcacggtaaacttcattcatagatcctcccttatttaacatcagaaaaatgtatactggggaaaagttgtatgaaggtggtgaacatgggagacttttagcaatgatgcagatttttttattagagtttatactgtagagaaatcatatgaagtcaataaatgtgggaaagcctttgtcagtattaatcccttaattgacctaagtatactcacactaggaaaaatctgtgtacatgtagcaaatgtgggaaagactataggcaataggaatctcctgcaaactcctacaggagaaaagttgtatgaatgtggaaactttagaaattgaaggaatttttcagttccaagtgcatcccttattctataggaaataaactggagacaaatctcatttaagagatgcagcaaagtgttcactaagagtgtttatcttgccagacataagaagatgaatggtagagcaacctgaaggatttagaaattacatataaatctttgcagttatgctatttgtaaacaggattatataggagagcaaataaacataagtatgcatttcttagagcagtagcttgcagtttcagttgagttctacttagaaattctttttagctagtgggcatgtgaagatatttagtcacccagaggagccagtaaatgttataatgttaaaaattaaagctgcaaaagaaataaaatggtgttaataaaaatttggcatctaataaaatcattttgtatatcatgaa

SEQ ID NO: 1784 - DNA, 1738 bp, Homo sapiens
tgagatacaaaatgattttattagataccaaaacctttattcacaccattttatttcttttgcagctttaatttttaacattataacatttactggctcctctgggtgactaaatatcttcacatgcccactagctaaaaagaatttctaagtagaactcaactgaaactgcaagctactgctctaagaaatgcataatgacatttatttgctctcctgtagaaccctgtttacaaatagcatcactgcaaagatttacacgtaattcctaaaactttcaggttgttcttccattaatcttctgatgtgtagcaagataaacactcttagtgaacacttggctacatctcttaaatgagagttctctccagtttgagttctttgtaaaataagggatgcacttggaactgaagtcttccctcaatttctaaattttctacattcatacagcttctctcctgtaggagtttgtaaaagattcctattgtctatagtctttcccacatttgctatatgtacagggttttatcctagtgtgagtatacttatgtcaattaaggggttaatactgacaaaggctttcccacatttatggtcttcatatgatttctctacagtataaactctgaaaaataaaaacatctgaatcattgctgaaagtcttcccatattcactacattcataaaacttttccccagtataattttttctgatgttaaatgaggatctatgaatgaactttaccatgataaacactgcttcatatacattctcttctgtaagatttctcacatgtatagtgattcatatagtctaaaggcttttccacacttaccacactattgggtttctctccattatgtactctttgatgggcagtaagatttgagcctttgctaaaagctttcccacactcactacatttatatggcttttctccagtatgaattctctgatgtacggtaaggtttgaactacagctgaaggtcttcccacatttaatacattcgtaaggtttctctccagtatgaattctgtgatgttgaagcagggatgacctatgactaaaggctttcccacatatatggcattcattagatagaaatcacatttcaatctaatgtgatttctcaaatgcatattcagtgattcaagctggttgaaggatttcctgcatttctgacattcaaagggtttttcttcagtatgaatactctgatgctgaacaagaaatgagaggctactaaagactttcagacatttgttgcattcatattgtttctccatagtgtgaattctttgatgtggagtaaggtgtgagctacagcagaaagctttctcacattctctacattcataaggcttctctccagtatggattttctgatggtgaatgagagacgacgtatgaatgaaggcctttccacatatacgacactcatagagtttttcttgcgtatgaattcttagatgttcaataagatgggacacacgcctaaaagactttccacagttcatacattcatatggtttctctccagtgtgagtgctctgatggttagtaagtgatgagccatggctaaaggccttcccacattcaatacatttgtaaggtttctctccactatggcttatctgatgtcgtgtaagggatgagccgtggctaaaagtcttcccacattcacgacattcacagggcttctctcctgtatgaattctccagtggcgattgaggat

SEQ ID NO: 1785 - DNA, 224 bp, Homo sapiens
ctcttcggccgttacctcttcagctcctgatcctcttccatcgctgggccggtttatggatcctcaggtggtgctggcggatcgggggctctgtcccatagcgcgaggcgcggaggcgaagcagaaagcaaggaccgaccgacggaaggcgcggagcacgtaaggagggaggaggagccgcaacggcgcggcagggcccagccgcggggcggggcatgaggctc

SEQ ID NO: 1786 - DNA, 1671 bp, Homo sapiens
tcctcaaggaccatttggttgcatggaacagaaaccagtcaaactagtttaaataaaagagggaatttattagaagaatacagaggttcttgcagagattccaacagctgcaaggggtcaacagctagaatcacgcctttctgaaggacagagtatgctgtaaccacaaacttctaattctgggttctgcaccatcaagaagagaatatcctacaggacagttctccttgtatactgcataaaggactagaatgtggattcatttctgcttgctttttgatccttatagtcctttatgctggcctcaaacttgtcaagcacatgttggcagacattcatgagctcattcaggcctctctgaaatggctcaacagctggaagggtacctcgagtctgaatgcgtaaattaattttgctctctgaaggatgggtcgtagtgtaaccacaaaattccacttccgggttcttcatgatcatgtaacgtagagaatttcctagggtatggtcttcctcgtgcaatacaaatgtcacacagtgtctatctgttccagctgcctggaccatttccagggctgtcttcctctcgccttcagccattgaggtcttcaatccagatatttttctacacacatattttttataaaaatgagatcatactgaatattgttttgtaactagctttttctcatttactatatcacattgcaacacattattattaatctactccagctacacagaattattcgcctctcattttcctgcctccacaaactctatcaataaatatttaatttattgcctccagtttttccctgctccatttgaccatccacactggccacaaggggagttttcttagaaaaacacaaacttaagtgtttgcaaaaatattttttggtagagtcacaagcaagggataggattagaataggactggtcctgctagaggatgaagagagggttgaaaggcatagaaatcccgattgctctagtataaaaatagaggatacagatgatcaatgtgcaggcccaactacggcttccattttgcaagagaaggaaactaggagaatggaaggttcaggagtcaagcagcagggagaaaaagagctcagcgcacagagtggctttaggagcagtctgcacatagaaagaaggtgagccgtagttacagggacagaggcacgagtaccgtcctcaggagcagaggcccggggcgtgatttttacacactgctgttgtaacgggggtgggcagttcggatacttaactctggtctcccaacttgtcttccctccttgatagctagtgtacctctcagcctctcaactgaaacacattcatgtctcctccccacttctctctccatgcttcttctctgcgccccgagtcaggccccggctgccaggccaggcagcgtgcccctcggccacccgctccccttgggcgcggcccgctccgcccgcctcctcctcggccgttacctctccagctcctgatcctcttccatcgctggggcggtttctggatcctcaggtggtgctggcggatcgggggctctgtcccatagcgcgaggcgcggaggcgaagcaggaagcaaggaccgaccgacggaaggcgcggaggacggaaggagggaggaggagccgcagcggcgcggcagggccc

SEQ ID NO: 1787 - DNA, 381 bp, Homo sapiens
tcacctttgttcccaggcgcccagcccccgcctcggcaacctttcgccgcccaggctcgctctccatccagctccctgcgtcccggccttcgctgtgctccctcaggtgcgcttcctctcgaatcggcccttcttgtcccctcgccgctggccccgaccctgcccgactccagctgtccagcgcaactacgtttctgcttccctgcgccacctgttctcctggcctccccccaccccgccccgcgattcctctggatgttcactccttccccagctgtgccactcttggcggcggccgggggtgcgcgcagacacctagccagcggggcttccgcaggggaatcaggcgggcggcggggacagcccggggcgagtggggga

SEQ ID NO: 1788 - DNA, 390 bp, Homo sapiens
tttatgagaacaggacttactctgtctcatccactatagctatatatctatccccaaggcctggaacatactagtgctcaaaaatatggatatctctttaaagaatttggctgagtgtaggaaatgtaggctctatggcacgctagtgtaagaggtcaggtttgagtgactgaaaagctgcatgccataactacttacatgaattcatagagtatttactaagtgtccactacctgtcaggtgttccaggtaccagaatcatgttgacctccaagttggtttagtgggtaaacaagataagcactaccaatagcatagtaaatgccaaggccaggaaacacagggtgtaatgaaagcacaaagaagtacccaaactaggctgagaggcct

SEQ ID NO: 1789 - DNA, 855 bp, Homo sapiens
ttcccagtggcaagtccgaaagcggcccgacttcccaactggggcggtgttgacccaggatggcccttcctgggaccccggccctcccgggccttttgtgggacgacaggcttaaactgtagtcggtcaacacaccttgaagagggaggggggtcacgtgcgagatgagtcaccacagaatacgaaggttgaaggcggtatttgtttcaccggggagcttgcagttgcattttcaactgggtcaaaatagggcaagaaagaaatgtctcttttgggggagtgagagtttgggagaaaactgtttcccaccttatcctttccgtcctaggattccttctacccccagagcgcgtcctctccggctgtagacttccttttccctttctccccagtggctcctcaaacctcctcacctgcggaacccgccctcacctttgttcccaggcgcccagcccccgcctcggcaacctttcgccgcccaggctcgctctccatccagctccctgcgtcccggccttcgctgtgctccctcaggtgcgcttcctctcgaatcggcccttcttgtcccctcgccgctggccccgaccctgcccgactccagctgtccagcgcaactacgtttctgcttccctgcgccacctgttctcctggcctcccccccccccgccccgcgattcctctggatgttcactccttccccagctgtgccactcttggcggcggccgggggtgcgcgcagacacctagccagcggggcttccgcaggggaatcaggcgggcggcggggacagcccggggcgagtgggggaggcgggcggcgagggcggagtggtctcactctaacccgggagtgac

SEQ ID NO: 1790 - DNA, 5476 bp, Homo sapiens
agatggcggcgcctgaggggtcttgggggctctaggccggccacctactggtttgcagcggagacgacgcatggggcctgcgcaataggagtacgctgcctgggaggcgtgactagaagcggaagtagttgtgggcgcctttgcaaccgcctgggacgccgccgagtggtctgtgcaggttcgcgggtcgctggcgggggtcgtgagggagtgcgccgggagcggagatatggtaagtagcgggtccagggaggggttcggcggtggaggtcggtcggttggcaacagtggggtctgtcggccgactcaggggtctgtggtgagccataaccggagtctgtggactgaacggcgggagtctatgggcagaatgatgaaccatctgggagttctatggtgagccacggtggggggctccttaatagaagtttagtggggactccgtgtggcagttccgtgggaaaccatgatcgggggttcttagggcagagggataagcgggttgtaaggagtcacattgagtggtctgtagtgagccgtgacgaggagtccgtgtccgggtatccgtggacagccgcgactgggggtgggtgcgggtgccaggtgggtctatgagataaacagggaggggtgcgtggagaaccgcgatgggaagtccgcagtgagttacgcggggtctgtgaggcgccacgatggagggtcgccatgacccattagcgagtgtggacgcagggagcgggtgtcggtgggtgcgtgatgggaagtatggagcagagtaataggatgtcagaggaagggatgggggtcagtggggactgtgatggagaggttttttgggggccccgatgtgaaatctgcaggcagagtggggatccctgctgaccacggtggagttgtaatggggggatgagccgccacggtgggggctgcttaaggatccgtaatgggggtgtcctgcaggagggagatggttcagacccagagcctccagatgccggggaggacagcaagtccgagaatggggagaatgcgcccatctactgcatctgccgcaaaccggacatcaactgcttcatgatgtgagcgcgggagagatgggcggggctgacactggcagggtggggtgaggccgatgggccgcgcccctcacatctccatcgcctgccccatcctctgcagcgggtgtgacaactgcaatgagtggttccatggggactgcatccggatcactgagaagatggccaaggccatccgggagtggtactgtcgggagtgcagaggtgagggccatggatggacagggaaggcaggtggggcttcaagggaggaggaggagccacaagggggggttatggggattagtgatacacgtctgtggtgagctggaatggggctccattgtgagtaatagaagatcccacgggaagaggcagctctgccctggacaggggtgcagagtaggtgggtgggtcagtaagggagcgaagaggaagaaagaggttttgggaccattcaagccatccagtgctcactcactttggccctactctctgccccacagagaaagaccccaagctagagattcgctatcggcacaagaagtcacgggagcgggatggcaatgagcgggacagcagtgagccccgggatgagggtggagggcgcaagaggcctgtccctgatccagacctgcagcgccgggcagggtcagggacaggggttggggccatgcttgctcggggctctgcttcgccccacaaatcctctccgcagcccttggtggccacacccagccaggtgagtggctgcataaagtgaatggatgtgtaaagtggttccgtttcagccctgcctgggtccatgatttctgttctgggccccctcctgcagcatcaccagcagcagcagcagcagatcaaacggtcagcccgcatgtgtggtgagtgtgaggcatgtcggcgcactgaggactgtggtcactgtgatttctgtcgggacatgaagaagttcgggggccccaacaagatccggcagaagtgccggctgcgccagtgccagctgcgggcccgggtgagcatggacagagctgggtagggtcaggtgtgggagagctggtgggtccatgcatggttagttaagtctaggcatggataaaccaggtgggattgggcctgactgtatcctgacaggtgggaaggggcctgtcatgtccagatgaatggggcatgacctggtatgctgggctggcagaacacccccaccaaccctgggtagacagagtggggccaggtgttttcaggtggtcatgcatgttggtacagatcaggcagggctgagcattcctggcaatgaggggtagcggggaggtgtgtctggggaggtaaggccaggccaggtgggtagggctagggcaaggccgccctccatccacctggggctgacctgggccttcctcctgccggcacaggaatcgtacaagtacttcccttcctcggtgagtccagccccccagggtggggtggggcatgcgggcagggcggtcagggccagtcctgagattctgccctgcagctctcaccagtgacgccctcagagtccctgccaaggccccgccggccactgcccacccaacagcagccacagccatcacagaagttagggcgcatccgtgaagatgagggggcagtggcgtcatcaacagtcaaggagcctcctgaggctacagccacacctgagccactctcagatgaggacctacctctggatcctgacctgtatcaggacttctgtgcaggggcctttgatgaccatggcctggtgagcagacaggagcatccactggtggaagggtggaggttacagaagcagagagtatccctaatgaggagacagagggtatggaaggctgatatgggacatgagtaggtggtggggttgtcacgagcggggcaggtgggtcagtgcatgccctgcttgcagccctggatgagcgacacagaagagtccccattcctggaccccgcgctgcggaagagggcagtgaaagtgaagcatgtgaagcgtcgggagaagaagtctgagaagaaggtgatggagagggtaaagtggatgtggaaaggcagagggtggggttgagggagaggcagaggtcagaggctgaatggggcaagagccagaaagggctagaatggagcaagggtctggggtctggggctgactttgactccaccctgacctgacttgtcttgctcaacagaaggaggagcgatacaagcggcatcggcagaagcagaagcacaaggataaatggaaacacccagagagggctgatgccaaggaccctgcgtcactgccccagtgcctggggcccggctgtgtgcgccccgcccagcccagctccaagtattgctcagatgactgtggcatgaagctggcagccaagtgagtcattcctgagaggttcaagggagtcaggaagtgcatggtagggcctgaccacagccttctgtatgtctaccagtcaatcagctatccaccagtcaccaaacagccactacccactcacccatccacctacccacccacctgcccgtgtgtccatccagccaccattccgccagtcacctatttacttctccttttgccatttgcgtctattttgccattctcacttactgatcacctcactcattctgttgcttgctaccttccctgcagccgcatctacgagatcctcccccagcgcatccagcagtggcagcagagcccttgcattgctgaagagcacggcaagaagctgctcgaacgcattcgccgagagcagcagagtgcccgcactcgccttcaggaaatggaacgccgattccatgagcttgaggccatcattctacgtgccaagcagcaggctgtgcgcgaggatgaggaggtgagcaagcaggggcgcagcagagcagggcctgtactttgtccttcccagccttattgttccttccattccatgcagagcaacgagggtgacagtgatgacacagacctgcagatcttctgtgtttcctgtgggcaccccatcaacccacgtgttgccttgcgccacatggagcgctgctacgccaaggttggggtgtcagactgagggggcggaccatgtgggaacatcagtgggccagtgggggacagatttgttgtctgggtggtgtcttgggagggcatgcagcgcacatccacagttccctccatttgtgctcatccctccagtatgagagccagacgtcctttgggtccatgtaccccacacgcattgaagggtaagtgagggtgccacgcagtgagaggtggggggttaaggcgggggtcagaagtgggatgtgtgtggagctggggcaggatacgggcaaccagccaggacagatggacctcccttccctccctctactgccctctctactccaaatccccagggccacacgactcttctgtgatgtgtataatcctcagagcaaaacatactgtaagcggctccaggtgctgtgccccgagcactcacgggaccccaaagtaaggttttccctcagctcctcccattttgcccctcctccctgcctcgctgtcccacattcatcccttccttcctcacctcacttttccttcactttttcctctcagcttccctgctgcttcaccctccattcctccttttccatgcctcctcaccgttccctgaaccctccattcttttccttctccctccttgagcccccattcctattctcccttatcaccgctattcatccccccaacctggcctccttgcaggtgccagctgacgaggtatgcgggtgcccccttgtacgtgatgtctttgagctcacgggtgacttctgccgcctgcccaagcgccagtgcaatcgccattactgctgggagaagctgcggcgtgcggaagtggacttggagcgcgtgcgtgtggtaggtttctgtgcggttttggtgctgcatgtggtaggtttccatgtcggacgtggccggggcaggcggggctgcaggtgttcctgcttaggactcctgccgctcccttggcagtggtacaagctggacgagctgtttgagcaggagcgcaatgtgcgcacagccatgacaaaccgcgcgggattgctggccctgatgctgcaccagacgatccagcacgatcccctcactaccgacctgcgctccagtgccgaccgctgagcctcctggcccggaccccttacaccctgcattccagatgggggagccgcccggtgcccgtgtgtccgttcctccactcatctgtttctccggttctccctgtgcccatccaccggttgaccgcccatctgcctttatcagagggactgtccccgtcgacatgttcagtgcctggtggggctgcggagtccactcatccttgcctcctctccctgggttttgttaataaaattttgaagaaaccaaggaa

SEQ ID NO: 1791 - DNA, 5476 bp, Homo sapiens
agatggcggcgcctgaggggtcttgtggggctctaggccggccacctactggtttgcagcggagacgacgcatggggcctgcgcaataggagtacgctgcctgggaggcgtgactagaagcggaagtagttgtgggcgcctttgcaaccgcctgggacgccgccgagtggtctgtgcaggttcgcgggtcgctggcgggggtcgtgagggagtgcgccgggagcggagatatggtaagtagcgggtccagggaggggttcggcggtggaggtcggtcggttggcaacagtggggtctgtcggccgactcaggggtctgtggtgagccataaccggagtctgtggactgaacggcgggagtctatgggcagaatgatgaaccatctgggagttctatggtgagccacggtggggggctccttaatagaagtttagtggggactccgtgtggcagttccgtgggaaaccatgatcgggggttcttagggcagagggataagcgggttgtaaggagtcacattgagtggtctgtagtgagccgtgacgaggagtccgtgtccgggtatccgtggacagccgcgactgggggtgggtgcgggtgccaggtgggtctatgagataaacagggaggggtgcgtggagaaccgcgatgggaagtccgcagtgagttacgcggggtctgtgaggcgccacgatggagggtcgccatgacccattagcgagtgtggacgcagggagcgggtgtcggtgggtgcgtgatgggaagtatggagcagagtaataggatgtcagaggaagggatgggggtcagtggggactgtgatggagaggttttttgggggccccgatgtgaaatctgcaggcagagtggggatccctgctgaccacggtggagttgtaatggggggatgagccgccacggtgggggctgcttaaggatccgtaatgggggtgtcctgcaggagggagatggttcagacccagagcctccagatgccggggaggacagcaagtccgagaatggggagaatgcgcccatctactgcatctgccgcaaaccggacatcaactgcttcatgatgtgagcgcgggagagatgggcggggctgacactggcagggtggggtgaggccgatgggccgcgcccctcacatctccatcgcctgccccatcctctgcagcgggtgtgacaactgcaatgagtggttccatggggactgcatccggatcactgagaagatggccaaggccatccgggagtggtactgtcgggagtgcagaggtgagggccatggatggacagggaaggcaggtggggcttcaagggaggaggaggagccacaagggggggttatggggattagtgatacacgtctgtggtgagctggaatggggctccattgtgagtaatagaagatcccacgggaagaggcagctctgccctggacaggggtgcagagtaggtgggtgggtcagtaagggagcgaagaggaagaaagaggttttgggaccattcaagccatccagtgctcactcactttggccctactctctgccccacagagaaagaccccaagctagagattcgctatcggcacaagaagtcacgggagcgggatggcaatgagcgggacagcagtgagccccgggatgagggtggagggcgcaagaggcctgtccctgatccagacctgcagcgccgggcagggtcagggacaggggttggggccatgcttgctcggggctctgcttcgccccacaaatcctctccgcagcccttggtggccacacccagccaggtgagtggctgcataaagtgaatggatgtgtaaagtggttccgtttcagccctgcctgggtccatgatttctgttctgggccccctcctgcagcatcaccagcagcagcagcagcagatcaaacggtcagcccgcatgtgtggtgagtgtgaggcatgtcggcgcactgaggactgtggtcactgtgatttctgtcgggacatgaagaagttcgggggccccaacaagatccggcagaagtgccggctgcgccagtgccagctgcgggcccgggtgagcatggacagagctgggtagggtcaggtgtgggagagctggtgggtccatgcatggttagttaagtctaggcatggataaaccaggtgggattgggcctgactgtatcctgacaggtgggaaggggcctgtcatgtccagatgaatggggcatgacctggtatgctgggctggcagaacacccccaccaaccctgggtagacagagtggggccaggtgttttcaggtggtcatgcatgttggtacagatcaggcagggctgagcattcctggcaatgaggggtagcggggaggtgtgtctggggaggtaaggccaggccaggtgggtagggctagggcaaggccgccctccatccacctggggctgacctgggccttcctcctgccggcacaggaatcgtacaagtacttcccttcctcggtgagtccagccccccagggtggggtggggcatgcgggcagggcggtcagggccagtcctgagattctgccctgcagctctcaccagtgacgccctcagagtccctgccaaggccccgccggccactgcccacccaacagcagccacagccatcacagaagttagggcgcatccgtgaagatgagggggcagtggcgtcatcaacagtcaaggagcctcctgaggctacagccacacctgagccactctcagatgaggacctacctctggatcctgacctgtatcaggacttctgtgcaggggcctttgatgaccatggcctggtgagcagacaggagcatccactggtggaagggtggaggttacagaagcagagagtatccctaatgaggagacagagggtatggaaggctgatatgggacatgagtaggtggtggggttgtcacgagcggggcaggtgggtcagtgcatgccctgcttgcagccctggatgagcgacacagaagagtccccattcctggaccccgcgctgcggaagagggcagtgaaagtgaagcatgtgaagcgtcgggagaagaagtctgagaagaaggtgatggagagggtaaagtggatgtggaaaggcagagggtggggttgagggagaggcagaggtcagaggctgaatggggcaagagccagaaagggctagaatggagcaagggtctggggtctggggctgactttgactccaccctgacctgacttgtcttgctcaacagaaggaggagcgatacaagcggcatcggcagaagcagaagcacaaggataaatggaaacacccagagagggctgatgccaaggaccctgcgtcactgccccagtgcctggggcccggctgtgtgcgccccgcccagcccagctccaagtattgctcagatgactgtggcatgaagctggcagccaagtgagtcattcctgagaggttcaagggagtcaggaagtgcatggtagggcctgaccacagccttctgtatgtctaccagtcaatcagctatccaccagtcaccaaacagccactacccactcacccatccacctacccacccacctgcccgtgtgtccatccagccaccattccgccagtcacctatttacttctccttttgccatttgcgtctattttgccattctcacttactgatcacctcactcattctgttgcttgctaccttccctgcagccgcatctacgagatcctcccccagcgcatccagcagtggcagcagagcccttgcattgctgaagagcacggcaagaagctgctcgaacgcattcgccgagagcagcagagtgcccgcactcgccttcaggaaatggaacgccgattccatgagcttgaggccatcattctacgtgccaagcagcaggctgtgcgcgaggatgaggaggtgagcaagcaggggcgcagcagagcagggcctgtactttgtccttcccagccttattgttccttccattccatgcagagcaacgagggtgacagtgatgacacagacctgcagatcttctgtgtttcctgtgggcaccccatcaacccacgtgttgccttgcgccacatggagcgctgctacgccaaggttggggtgtcagactgagggggcggaccatgtgggaacatcagtgggccagtgggggacagatttgttgtctgggtggtgtcttgggagggcatgcagcgcacatccacagttccctccatttgtgctcatccctccagtatgagagccagacgtcctttgggtccatgtaccccacacgcattgaagggtaagtgagggtgccacgcagtgagaggtggggggttaaggcgggggtcagaagtgggatgtgtgtggagctggggcaggatacgggcaaccagccaggacagatggacctcccttccctccctctactgccctctctactccaaatccccagggccacacgactcttctgtgatgtgtataatcctcagagcaaaacatactgtaagcggctccaggtgctgtgcccgagcactcacgggaccccaaagtaaggttttccctcagctcctcccattttgcccctcctccctgcctcgctgtcccacattcatcccttccttcctcacctcacttttccttcactttttcctctcagcttccctgctgcttcaccctccattcctccttttccatgcctcctcaccgttccctgaaccctccattcttttccttctccctccttgagcccccattcctattctcccttatcaccgctattcatccccccaacctggcctccttgcaggtgccagctgacgaggtatgcgggtgcccccttgtacgtgatgtctttgagctcacgggtgacttctgccgcctgcccaagcgccagtgcaatcgccattactgctgggagaagctgcggcgtgcggaagtggacttggagcgcgtgcgtgtggtaggtttctgtgcggttttggtgctgcatgtggtaggtttccatgtcggacgtggccggggcaggcggggctgcaggtgttcctgcttaggactcctgccgctcccttggcagtggtacaagctggacgagctgtttgagcaggagcgcaatgtgcgcacagccatgacaaaccgcgcgggattgctggccctgatgctgcaccagacgatccagcacgatcccctcactaccgacctgcgctccagtgccgaccgctgagcctcctggcccggaccccttacaccctgcattccagatgggggagccgcccggtgcccgtgtgtccgttcctccactcatctgtttctccggttctccctgtgcccatccaccggttgaccgcccatctgcctttatcagagggactgtccccgtcgacatgttcagtgcctggtggggctgcggagtccactcatccttgcctcctctccctgggttttgttaataaaattttgaagaaaccaaggaa

SEQ ID NO: 1792 - DNA, 128 bp, Homo sapiens
cccagctactcggaaggctgaggcaggataatcgcttgaacccgggaggcggaggttgcagtgagctgagatcgcgccattgcactccagcctgggcaacaagagtgaaactccgtctcaaaaaataa
